(19) United States
(12) Patent Application Publication
(10) Pub. No.: US 2005/0170500 A1
(43) Pub. Date: Aug. 4, 2005

(54) Methods for identifying risk of melanoma and treatments thereof

(76) Inventors: Richard B. Roth, La Jolla, CA (US); Matthew Roberts Nelson, San Marcos, CA (US); Stefan M. Kammerer, San Diego, CA (US); Andreas Braun, San Diego, CA (US)

Correspondence Address: BIOTECHNOLOGY LAW GROUP, c/o PORTFOLIO IP, P.O. BOX 52050, MINNEAPOLIS, MN, 55402, US

(21) Appl. No.: 10/704,513

(22) Filed: Nov. 6, 2003

Related U.S. Application Data
(60) Provisional application No. 60/489,703, filed on Jul. 23, 2003.
(60) Provisional application No. 60/424,475, filed on Nov. 6, 2002.

(51) Int. Cl. C12N 5/06

(52) U.S. Cl. 435/344.1

(57) ABSTRACT

Provided herein are methods for identifying risk of melanoma in a subject and/or subjects at risk of melanoma, reagents and kits for carrying out the methods, methods for identifying candidate therapeutics for treating melanoma, therapeutic methods for treating melanoma in a subject and compositions comprising one or more melanoma cells and one or more CDK10, FPGT, PCLO or REPS2 directed agents. These embodiments are based upon an analysis of polymorphic variations in a CDK10, FPGT, PCLO or REPS2 nucleic acid, exemplified by nucleotide sequences of SEQ ID NO: 1, 2, 3 or 4.

### RELATED PATENT APPLICATIONS

[0001] This patent application claims the benefit of provisional patent application 60/424,475 filed Nov. 6, 2002 and provisional patent application 60/489,703 filed Jul. 23, 2003, having attorney docket number 524593004000 and 524593004001, respectively. Each of these provisional patent applications names Richard B. Roth et al. as inventors. Each of these provisional patent applications is hereby incorporated herein by reference in its entirety, including all drawings and cited documents.

### FIELD OF THE INVENTION

[0002] The invention relates to genetic methods for identifying risk of melanoma and treatments that specifically target the disease.

### BACKGROUND

[0003] In some parts of the world, especially among western countries, the number of people who develop melanoma is increasing faster than any other cancer. In the United States, for example, the number of new cases of melanoma has more than doubled in the past twenty years. The probability of developing melanoma increases with age, but this disease effects people of all age groups. Melanoma is one of the most common cancers in young adults.

[0004] Melanoma occurs when melanocytes (pigment cells) become malignant. Most pigment cells are in skin, and when melanoma begins its etiology in the skin it is referred to as coetaneous melanoma. Melanoma may also occur in the eye and is called ocular melanoma or intraocular melanoma. Rarely, melanoma arises in the meninges, the digestive tract, lymph nodes or other areas where melanocytes are found. Within the skin, melanocytes are located throughout the lower part of the epidermis, the latter being the surface layer of the skin. Melanocytes produce melanin, which is the pigment that gives skin its natural color. When skin is exposed to the sun, melanocytes produce more pigment, causing the skin to tan or darken.

[0005] Sometimes, clusters of melanocytes and surrounding tissue form benign growths referred to as moles or nevi (singular form is nevus). Cells in or near the nevi can divide without control or order and form malignant tumors. When melanoma spreads, cancer cells often are found in the lymph nodes. If the cancer has reached the lymph nodes, it may mean that cancer cells have spread to other parts of the body such as the liver, lungs or brain, giving rise to metastatic melanoma.

[0006] Melanoma is currently diagnosed by assessing risk factors and by performing biopsies. Risk factors for melanoma are a family history of melanoma, the presence of dysplastic nevi, patient history of melanoma, weakened immune system, many ordinary nevi, exposure levels to ultraviolet radiation, exposure to severe sunburns especially as a child or teenager; and fair skin. In a biopsy, a pathologist typically examines the biopsied tissue under a microscope to identify cancer cells. Depending upon the thickness of a tumor, if one exists, a physician may order chest x-ray, blood tests, liver scans, bone scans, and brain scans to determine whether the cancer spread to other tissues. Also, a test that identifies p16 nucleotide sequences is sold.

[0007] Upon a diagnosis of melanoma, the standard treatment is surgery. Side effects of surgery typically are pain and scarring. Surgery is generally not effective, however, in controlling melanoma that is known to have spread to other parts of the body. In such cases, physicians may utilize other methods of treatment, such as chemotherapy, biological therapy, radiation therapy, or a combination of these methods. Chemotherapy agents for treating melanoma include cisplatin, vinblastine, and dacarbazine. Chemotherapy can lead to side effects such as an increased probability of infection, bruising and bleeding, weakness and fatigue, hair loss, poor appetite, nausea and vomiting, and mouth and lip sores. Side effects of radiation therapy include fatigue and hair loss in the treated area. Biological therapies currently utilized for treatment of melanoma include interferon and interleuken-2. Side effects caused by biological therapies include flu-like symptoms, such as chills, fever, muscle aches, weakness, loss of appetite, nausea, vomiting, and diarrhea; bleeding and bruising skin; rashes, and swelling.

[0008] Certain melanoma therapeutics are in clinical trials. For example, canvaxin, which is a whole cell allogenic vaccine developed by irradiating tumor cells from two different patients, is under study. In addition, MAGE-1 and 3 minigenes and peptides and gp100 peptides are being tested. Upcoming studies include testing of agents such as dacarbazine with a bcl-2 antisense oligonucleotide, and paclitaxel in combination with a matrix metalloprotease inhibitor.

### SUMMARY

[0009] It has been discovered that polymorphic variations of CDK10, FPGT, PCLO and REPS2 loci in human genomic DNA are associated with occurrence of melanoma. Thus, featured herein are methods for identifying a subject at risk of melanoma and/or determining risk of melanoma in a subject, which comprise detecting the presence or absence of one or more polymorphic variations associated with melanoma in a nucleic acid sample from the subject. The one or more polymorphic variations of ten are detected in or near the CDK10, FPGT, PCLO and/or REPS2 nucleotide sequence, which are set forth as SEQ ID NOs: 1, 2, 3 and 4 respectively, or a substantially identical nucleotide sequence thereof.

[0010] Also featured are nucleic acids that encode a CDK10, FPGT, PCLO or REPS2 polypeptide, and include one or more polymorphic variations associated with melanoma, and oligonucleotides which hybridize to those nucleic acids. Also provided are polypeptides encoded by nucleic acids having a CDK10, FPGT, PCLO or REPS2 nucleotide sequence, which include the full-length polypeptide, isoforms and fragments thereof. In addition, featured are methods for identifying candidate therapeutic molecules for treating melanoma and related disorders, as well as methods of treating melanoma in a subject by administering a therapeutic molecule.

[0011] Also provided are compositions comprising a melanoma cell and/or a CDK10, FPGT, PCLO or REPS2 nucleic acid, or a fragment or substantially identical nucleic acid thereof, with a RNAi, siRNA, antisense DNA or RNA, or ribozyme nucleic acid designed from a CDK10, FPGT, PCLO or REPS2 nucleotide sequence. In an embodiment, the nucleic acid is designed from a CDK10, FPGT, PCLO or REPS2 nucleotide sequence that includes one or more melanoma associated polymorphic variations, and in some instances, specifically interacts with such a nucleotide sequence. Further, provided are arrays of nucleic acids bound to a solid surface, in which one or more nucleic acid molecules of the array are CDK10, FPGT, PCLO or REPS2 nucleic acids, or a fragment or substantially identical nucleic acid thereof, or a complementary nucleic acid of the foregoing. Featured also are compositions comprising a melanoma cell and/or a protein, polypeptide or peptide encoded by a CDK10, FPGT, PCLO or REPS2 nucleic acid with an antibody that specifically binds to the protien, polypeptide or peptide. In an embodiment, the antibody specifically binds to an epitope in a CDK10, FPGT, PCLO or REPS2 protein, polypeptide or peptide that includes a non-synonymous amino acid modification associated with melanoma.

### BRIEF DESCRIPTION OF THE DRAWINGS

[0012] FIGS. 1A to 1Z show a genomic sequence of cyclin-dependent kinase 10 (CDK10) with the polymorphic variants in IUPAC format. The genomic sequence set forth in FIGS. 1A to 1Z correspond to SEQ ID NO: 1.

[0013] FIGS. 2A to 2X show a genomic sequence of presynaptic cytomatrix protein (PCLO) with the polymorphic variants in IUPAC format. The genomic sequence set forth in FIGS. 2A to 2X correspond to SEQ ID NO: 2.

[0014] FIGS. 3A to 3Z show a genomic sequence of a region near cardiac ankyrin repeat kinase (CARK) and fucose-1-phosphate guanylyltransferase (FPGT) with the polymorphic variants in IUPAC format. The genomic sequence set forth in FIGS. 3A to 3Z correspond to SEQ ID NO: 3. The following nucleotide representations are used throughout the specification and figures: “A” or “a” is adenosine, adenine, or adenylic acid; “C” or “c” is cytidine, cytosine, or cytidylic acid; “G” or “g” is guanosine, guanine, or guanylic acid; “T” or “t” is thymidine, thymine, or thymidylic acid; and “I” or “i” is inosine, hypoxanthine, or inosinic acid. SNPs are designated by the following convention: “R” represents A or G, “M” represents A or C; “W” represents A or T; “Y” represents C or T; “S” represents C or G; “K” represents G or T; “V” represents A, C or G; “H” represents A, C, or T; “D” represents A, G, or T; “B” represents C, G, or T; and “N” represents A, G, C, or T.

[0015] FIGS. 4A-4C show human cDNA structures for three isoforms of CDK10.

[0016] FIGS. 5A and 5B show a human cDNA structure for PCLO.

[0017] FIG. 6A shows a human cDNA structure for FPGT. FIG. 6B shows a human cDNA structure for CARK.

[0018] FIG. 7 shows a human cDNA structure for REPS2.

[0019] FIGS. 8A-8C show human polypeptide sequences for three isoforms of CDK10.

[0020] FIG. 9 shows a human polypeptide sequence for PCLO.

[0021] FIGS. 10A-10B show human polypeptide sequences for FPGT and CARK.

[0022] FIG. 11 shows a human polypeptide sequence for REPS2.

[0023] FIGS. 12, 13 and 14 show proximal SNPs in and around the CDK10 gene for males and females combined, females alone, and males alone, respectively. The position of each SNP on the chromosome is shown on the x-axis and the y-axis provides the negative logarithm of the p-value comparing the estimated allele to that of the control group. Also shown in FIGS. 12-14 are the exons and introns of the genes in the approximate chromosomal positions.

[0024] FIGS. 15, 16 and 17 show proximal SNPs in and around the PCLO gene for males and females combined, females alone, and males alone, respectively. The position of each SNP on the chromosome is shown on the x-axis and the y-axis provides the negative logarithm of the p-value comparing the estimated allele to that of the control group. Also shown in FIGS. 15-17 are the exons and introns of the genes in the approximate chromosomal positions.

[0025] FIGS. 18, 19 and 20 show proximal SNPs in and around the FPGT/CARK genes for males and females combined, females alone, and males alone, respectively. The position of each SNP on the chromosome is shown on the x-axis and the y-axis provides the negative logarithm of the p-value comparing the estimated allele to that of the control group. Also shown in FIGS. 18-20 are the exons and introns of the genes in the approximate chromosomal positions.

[0026] FIG. 21 depicts effects of CDK10_siRNA on melanoma A375 cell line proliferation according to a Wst-1 assay.

[0027] FIGS. 22A to 22UU show a genomic sequence of presynaptic cytomatrix protein (REPS2) with the polymorphic variants in IUPAC format. The genomic sequence set forth in FIGS. 22A-22UU correspond to SEQ ID NO: 4. The following nucleotide representations are used throughout the specification and figures: “A” or “a” is adenosine, adenine, or adenylic acid; “C” or “c” is cytidine, cytosine, or cytidylic acid; “G” or “g” is guanosine, guanine, or guanylic acid; “T” or “t” is thymidine, thymine, or thymidylic acid; and “I” or “i” is inosine, hypoxanthine, or inosinic acid. SNPs are designated by the following convention: “R” represents A or G, “M” represents A or C; “W” represents A or T; “Y” represents C or T; “S” represents C or G; “K” represents G or T; “V” represents A, C or G; “H” represents A, C, or T; “D” represents A, G, or T; “B” represents C, G, or T; and “N” represents A, G, C, or T. The SNP designated as rs1904528 herein is located at position 38753 in these figures.

### DETAILED DESCRIPTION

[0028] It has been discovered that polymorphic variants in and around CDK10, FPGT, PCLO or REPS2 nucleotide sequences are associated with occurrence of melanoma in subjects. Thus, detecting genetic determinants associated with an increased risk of melanoma occurrence can lead to early identification of melanoma or susceptibility to melanoma and early prescription of preventative measures and treatments. Also, associating CDK10, FPGT, PCLO and REPS2 polymorphic variants with melanoma has provided new targets for screening molecules useful in melanoma prognostics/diagnostics and melanoma treatments.

Melanoma and Sample Selection

[0029] Melanoma is typically described as a malignant neoplasm derived from cells capable of forming melanin. Melanomas arise most commonly in the skin of any part of the body, or in the eye, and rarely, in the mucous membranes of the genitalia, anus, oral cavity, or other sites. Melanoma occurs mostly in adults and may originate de novo or from a pigmented nevus or lentigo maligna. Melanomas frequently metastasize widely to regions such as lymph-nodes, skin, liver, lungs, and brain.

[0030] In the early phases, the cutaneous form is characterized by proliferation of cells at the dermal-epidermal junction that soon invade adjacent tissues. The cells vary in amount and pigmentation of cytoplasm; the nuclei are relatively large and irregular in shape, with prominent acidophilic nucleoli; and mitotic figures tend to be numerous. Other criteria for melanomas are asymmetry, irregular borders, heterogeneous color, large diameter, and a recent change in shape, size or pigmentation. Excised melanoma skin samples are often subjected to the following analyses: diagnosis of the melanocytic nature of the lesion and confirmation of its malignancy; maximum tumor thickness in millimeters (according to Breslow's method); assessment of completeness of excision of invasive and in situ components and microscopic measurements of the shortest extent of clearance; level of invasion (Clark); presence and extent of regression; presence and extent of ulceration; histological type and special variants; pre-existing lesion; mitotic rate; vascular invasion; neurotropism; cell type; tumor lymphocyte infiltration; and growth phase, vertical or radial.

[0031] Based in part upon selection criteria set forth above, individuals having melanoma can be selected for genetic studies. Also, individuals having no history of cancer or melanoma often are selected for genetic studies. Other selection criteria can include: a tissue or fluid sample is derived from an individual characterized as Caucasian; a sample is derived from an individual of German paternal and maternal descent; and relevant phenotype information is available for the individual. Phenotype information corresponding to each individual can include sex of the individual, number of nevi (e.g., actual number or relative number (e.g., few, moderate, numerous)), hair color (e.g., black, brown, blond, red), diagnosis of melanoma (e.g, tumor thickness, date of primary diagnosis, age of individual as of primary diagnosis, post-operative tumor classification, presence of nodes, occurrence of metastases, subtype, location), country or origin of mother and father, presence of certain conditions for each individual (e.g., coronary heart disease, cardiomyopathy, arteriosclerosis, abnormal blood clotting/thrombosis, emphysema, asthma, diabetes type 1, diabetes type 2, Alzheimer's disease, epilepsy, schizophrenia, manic depression/bipolar disorder, autoimmune disease, thyroid disorder, and hypertension), presence of cancer in the donor individual or blood relative (e.g., melanoma, basaliom/spinaliom/lentigo malignant/mycosis fungoides, breast cancer, colon cancer, rectum cancer, lung cancer, lung cancer, bronchus cancer, prostate cancer, stomach cancer, leukemia, lymphoma, or other cancer in donor, donor parent, donor aunt or uncle, donor offspring or donor grandparent).

[0032] Provided herein is a set of blood samples and a set of corresponding nucleic acid samples isolated from the blood samples, where the blood samples are donated from individuals diagnosed with melanoma. The sample set often includes blood samples or nucleic acid samples from 100 or more, 150 or more, or 200 or more individuals having melanoma, and sometimes from 250 or more, 300 or more, 400 or more, or 500 or more individuals. The individuals can have parents from any place of origin, and in an embodiment, the set of samples are extracted from individuals of German paternal and German maternal ancestry. The samples in each set may be selected based upon five or more criteria and/or phenotypes set forth above.

Polymorphic Variants Associated with Melanoma

[0033] A genetic analysis described hereafter linked melanoma with polymorphic variants of CDK10, FPGT, PCLO and REPS2 from human subjects. Nucleotide sequences representative of CDK10, FPGT, PCLO and REPS2 nucleic acids are set forth in FIGS. 1A-1Z (SEQ ID NO: 1), FIGS. 2A-2X (SEQ ID NO: 2), FIGS. 3A-3Z (SEQ ID NO: 3), and FIGS. 22A-22UU (SEQ ID NO: 4), respectively, and are incorporated herein by reference from published database entries (see Examples section and http address at www.ncbi.nlm.nih.gov/LocusLink/). The following is a description of CDK10, FPGT, PCLO and REPS2 molecules.

CDK10

[0034] The protein CDK10 (cyclin-dependent kinase (CDC2-like) 10) is also known as cyclin-dependent kinase 10 isoform 1 (331 amino acids); cyclin-dependent kinase 10 isoform 2 (314 amino acids); cyclin-dependent kinase 10 isoform 3 (123 amino acids); CDC2-related protein kinase; cell division protein kinase 10; cyclin-dependent kinase related protein; serine/threonine protein kinase and PISSLRE. CDK10 has been mapped to chromosomal position 16q24.

[0035] The protein encoded by CDK10 belongs to the CDK subfamily of the Ser/Thr protein kinase family: The CDK subfamily members are highly similar to the gene products of S. cerevisiae cdc28, and S. pombe cdc2, and are known to be essential for cell cycle progression. This kinase has been shown to play a role in cellular proliferation. Its function is limited to cell cycle G2-M phase. At least three alternatively spliced transcript variants encoding different isoforms have been reported, two of which contain multiple non-AUG translation initiation sites. Cyclin-dependent kinases (CDKs) are CDC2 (NCBI MIM 116940)-related kinases that bind to cyclin to form active holoenzymes that play a pivotal role in the regulation of the eukaryotic cell cycle. A 360-amino acid protein PISSLRE was predicted based on the amino acid sequence of the region corresponding to the conserved CDC2 PSTAIRE motif. PISSLRE contains all the structural elements characteristic of CDKs and unique extensions at both ends. Sequence comparisons revealed that it shares 41% and 50% protein sequence identity with CDC2 and CDC2L1 (NCBI MIM 176873), respectively. It was determined that PISSLRE was expressed broadly in human tissues as a 2-kb mRNA. An additional 3.5-kb transcript was observed in some tissues (Brambilla et al., Molecular cloning of PISSLRE, a novel putative member of the cdk family of protein serine/threonine kinases. Oncogene 9: 3037-3041, 1994).

FPGT

[0036] The protein FPGT (fucose-1-phosphate guanylyltransferase) is also known as GFPP and GDP-beta-L-fucose pyrophosphorylase. FPGT contains about 594 amino acids. FPGT has been mapped to chromosomal position 1p31.1

[0037] L-fucose is a key sugar in glycoproteins and other complex carbohydrates since it may be involved in many of the functional roles of these macromolecules, such as in cell-cell recognition. The fucosyl donor for these fucosylated oligosaccharides is GDP-beta-L-fucose. There are two alternate pathways for the biosynthesis of GDP-fucose; the major pathway converts GDP-alpha-D-mannose to GDP-beta-L-fucose. FPGT participates in an alternate pathway that is present in certain mammalian tissues, such as liver and kidney, and appears to function as a salvage pathway to reutilize L-fucose arising from the turnover of glycoproteins and glycolipids. This pathway involves the phosphorylation of L-fucose to form beta-L-fucose-1-phosphate, and then condensation of the beta-L-fucose-1-phosphate with GTP by fucose-1-phosphate guanylyltransferase to form GDP-beta-L-fucose.

[0038] GFPP was purified from pig kidney and a partial protein sequence was determined. Human cDNAs encoding a region similar to one of the pig GFPP peptides also were identified. Using a PCR strategy with primers based on one of the ESTs, a cDNA corresponding to the entire human GFPP coding region was cloned. The predicted GFPP protein contains 594 amino acids. When expressed in mammalian cells, the human enzyme exhibited high levels of GFPP activity. Northern blot analysis indicated that the 3.5-kb GFPP mRNA is expressed in several human tissues (Pastuszak et al., GDP-L-fucose pyrophosphorylase: purification, cDNA cloning, and properties of the enzyme. J. Biol. Chem. 273: 30165-30174, 1998).

PCLO

[0039] The protein PCLO is also known as piccolo (presynaptic cytomatrix protein), ACZ, KIAA0559 and aczonin. PCLO contains about 1225 amino acids. PCLO has been mapped to chromosomal position 7q11.23-q21.1.

[0040] Synaptic vesicles dock and fuse in the active zone of the plasma membrane at chemical synapses. The presynaptic cytoskeletal matrix (PCM), which is associated with the active zone and is situated between synaptic vesicles, is thought to be involved in maintaining the neurotransmitter release site in register with the postsynaptic reception apparatus. The cycling of synaptic vesicles is a multistep process involving a number of proteins (see NCBI MIM 603215 ). Among the components of the PCM that orchestrate these events are Bassoon (BSN; NCBI MIM 604020), RIM (RBBP8; NCBI MIM 604124), Oboe, and Piccolo.

[0041] By screening human brain cDNAs for those encoding proteins larger than 50 kD, a partial cDNA encoding PCLO, referred to as KIAA0559, was identified. RT-PCR analysis detected PCLO expression in kidney, with little or no expression in all other tissues tested (Nagase et al., Prediction of the coding sequences of unidentified human genes. IX. The complete sequences of 100 new cDNA clones from brain which can code for large proteins in vitro. DNA Res. 5: 31-39, 1998).

[0042] By searching EST and genome databases with a murine Pclo cDNA probe, genomic sequences and a brain-specific EST (KIAA0559) encoding human PCLO were identified. Sequence analysis indicated that the deduced 4,880-amino acid rat Pclo protein is 86% identical to human PCLO. In addition, PCLO shares significant amino acid sequence homology with BSN. BSN and PCLO share 10 homology regions, or PBH regions. PBH1 and PBH2 contain 2 double-zinc finger motifs. PBH4, PBH6, and PBH8 are likely to form coiled-coil structures. At the C terminus, unlike BSN but like RIM and Oboe, PCLO contains a PDZ domain and a C2 domain. The PCLO C2 domain contains all the asp residues required for calcium binding. PCLO also contains multiple proline-rich segments. Confocal microscopy analysis of cultured hippocampal neurons showed colocalization of BSN and PCLO at identical GABAergic and glutamergic synapses, of synaptotagmin (see SYTI; NCBI MIM 185605) and PCLO along dendritic profiles, and of PCLO zinc fingers and PRA1 (NCBI MIM 604925) at nerve terminals (Fenster et al., Piccolo, a presynaptic zinc finger protein structurally related to Bassoon. Neuron 25: 203-214, 2000).

[0043] Using cAMP-GEFII (NCBI MIM 606058) as bait in a yeast 2-hybrid screen, mouse piccolo was cloned from an insulin-secreting cell line cDNA library. Northern blot analysis of mouse tissues revealed high levels in cerebrum and cerebellum and moderate levels in pituitary gland, pancreatic islets, and a pheochromocytoma-derived mouse cell line. In situ hybridization of mouse brain revealed piccolo mRNA expressed in cerebral cortex, hippocampus, olfactory bulb, cerebellar cortex, and pituitary gland. The distribution of piccolo mRNA largely overlapped that of cAMP-GEFII and Rim2 (NCBI MIM 606630) mRNA in tissues, cell lines, and mouse brain. Mouse piccolo interacts with both cAMP-GefII and Rim2. In the presence of Ca(2+), the C2A domain of piccolo could homodimerize, it could interact with the C2A domain of Rim2, or it could bind the cAMP GefII-Rim2 complex. It did not bind cAMP-GefII directly. Treatment of pancreatic islets with antisense piccolo oligonucleotides inhibited insulin secretion induced by a cAMP analog and high glucose stimulation. Piccolo serves as a Ca(2+) sensor in exocytosis in pancreatic beta cells and that the formation of a cAMP-GEFII-RIM2 piccolo complex is required (Fujimoto et al., Piccolo, a Ca(2+) sensor in pancreatic beta-cells: involvement of cAMP-GEFII-Rim2-piccolo complex in cAMP-dependent exocytosis. J. Biol. Chem. 277: 50497-50502, 2002).

[0044] By comparing the human PCLO genomic sequence with the rat Pclo cDNA, it was determined that the human PCLO gene contains at least 19 exons and spans over 350 kb.

REPS2

[0045] The protein REPS2 (RALBP1 associated Eps domain containing 2) is also known as POB1 and partner of Ral-binding protein 1. REPS2 contains about 521 amino acids. REPS2 has been mapped to chromosomal position Xp22.22.

[0046] Small G proteins have GDP-bound inactive and GTP-bound active forms; RAL proteins (e.g., RALA; NCBI MIM 179550) shift from the inactive to the active state through the actions of RALGDS (NCBI MIM 601619). RALGDS interacts with the active form of RAS (see HRAS; NCBI MIM 190020).

[0047] Using RALA-binding protein-1 (RALBP1; NCBI MIM 605801) as bait in a yeast 2-hybrid screen of a brain cDNA library, cDNAs encoding REPS2, which is designated POB1, were identified (Ikeda et al., Identification and characterization of a novel protein interacting with Ral-binding protein 1, a putative effector protein of Ral. J. Biol. Chem. 273: 814-821, 1998). Sequence analysis predicted that the 521-amino acid protein has 2 potential initiator methionines in its N terminus, a central EPS15 (NCBI MIM 600051)-like domain, and 2 proline-rich regions and a putative coiled-coil structure in its C terminus. Northern blot analysis revealed strong expression in rat cerebrum, cerebellum, lung, and testis, with weak expression in kidney and no expression in heart, thymus, liver, spleen, or adrenal gland. Immunoprecipitation and immunoblot analyses confirmed that the C-terminal 146 amino acids of REPS2 and the C-terminal 147 residues of RALBP1 interact in intact cells. RAL interacts with a distinct region of RALBP1, just N terminal of the REPS2-binding domain, and both proteins can interact simultaneously with RALBP1. Immunoblot analysis established that REPS2 is tyrosine phosphorylated in response to epidermal growth factor (EGF; NCBI MIM 131530) and interacts with the EGF receptor (EGFR; NCBI MIM 131550), possibly through the adaptor protein GRB2 (NCBI MIM 108355), with which REPS2 interacts specifically.

[0048] Using nuclear magnetic resonance spectroscopy, it was shown that the EPS15 homology domain of REPS2 consists of 2 EF-hand structures, the second of which binds calcium (Koshiba et al., Solution structure of the Eps15 homology domain of a human POB1 (partner of RaIBP1). FEBS Lett. 442: 138-142, 1999).

[0049] As used herein, “polymorphic site” refers to a region in a nucleic acid at which two or more alternative nucleotide sequences are observed in a significant number of nucleic acid samples from a population of individuals. A polymorphic site may be a nucleotide sequence of two or more nucleotides, an inserted nucleotide or nucleotide sequence, a deleted nucleotide or nucleotide sequence, or a microsatellite, for example. A polymorphic site that is two or more nucleotides in length may be 3, 4, 5, 6, 7, 8, 9, 10, 11, 12, 13, 14, 15 or more, 20 or more, 30 or more, 50 or more, 75 or more, 100 or more, 500 or more, or about 1000 nucleotides in length, where all or some of the nucleotide sequences differ within the region. A polymorphic site is often one nucleotide in length, which is referred to herein as a “single nucleotide polymorphism” or a “SNP.”

[0050] Where there are two, three, or four alternative nucleotide sequences at a polymorphic site, each nucleotide sequence is referred to as a “polymorphic variant.” Where two polymorphic variants exist, for example, the polymorphic variant represented in a minority of samples from a population is sometimes referred to as a “minor allele” and the polymorphic variant that is more prevalently represented is sometimes referred to as a “major allele.” Many organisms possess a copy of each chromosome (e.g., humans), and those individuals who possess two major alleles or two minor alleles are often referred to as being “homozygous” with respect to the polymorphism, and those individuals who possess one major allele and one minor allele are normally referred to as being “heterozygous” with respect to the polymorphism. Individuals who are homozygous with respect to one allele are sometimes predisposed to a different phenotype as compared to individuals who are heterozygous or homozygous with respect to another allele. As shown hereafter, certain polymorphic variants of CDK10, FPGT, PCLO or REPS2 nucleotide sequences are associated with melanoma

[0051] A genotype or polymorphic variant may be expressed in terms of a “haplotype,” which as used herein refers to two or more polymorphic variants occurring within genomic DNA in a group of individuals within a population. For example, two SNPs may exist within a gene where each SNP position includes a cytosine variation and an adenine variation. Certain individuals in a population may carry one allele (heterozygous) or two alleles (homozygous) having the gene with a cytosine at each SNP position. As the two cytosines corresponding to each SNP in the gene travel together on one or both alleles in these individuals, the individuals can be characterized as having a cytosine/cytosine haplotype with respect to the two SNPs in the gene.

[0052] As used herein, “phenotype” refers to a trait which can be compared between individuals, such as presence or absence of a condition, a visually observable difference in appearance between individuals, metabolic variations, physiological variations, variations in the function of biological molecules, and the like. An example of a phenotype is occurrence of melanoma.

[0053] Researchers sometimes report a polymorphic variant in a database without determining whether the variant is represented in a significant fraction of a population. Because a subset of these reported polymorphic variants are not represented in a statistically significant portion of the population, some of them are sequencing errors and/or not biologically relevant. Thus, it often is not known whether a reported polymorphic variant is statistically significant or biologically relevant until the presence of the variant is detected in a population of individuals and the frequency of the variant is determined. Methods for detecting a polymorphic variant in a population are described herein, such as in Example 2. A polymorphic variant is statistically significant and often biologically relevant if it is represented in 5% or more of a population, sometimes 10% or more, 15% or more, or 20% or more of a population, and often 25% or more, 30% or more, 35% or more, 40% or more, 45% or more, or 50% or more of a population.

[0054] A polymorphic variant may be detected on either or both strands of a double-stranded nucleic acid. Also, a polymorphic variant may be located within an intron or exon of a gene or within a portion of a regulatory region such as a promoter, a 5′ untranslated region (UTR), a 3′ UTR, and in DNA (e.g., genomic DNA (gDNA) and complementary DNA (cDNA)), RNA (e.g., mRNA, tRNA, and rRNA), or a polypeptide. Polymorphic variations may or may not result in detectable differences in gene expression, polypeptide structure, or polypeptide function.

[0055] For duplex DNA, a polymorphic variation may be reported from one strand or its complementary strand. For example, a thymine at a particular position in SEQ ID NO: 1, 2, 3 or 4 can be reported as an adenine from the complementary strand. Also, while polymorphic variations at all positions within a haplotype often are reported from the same strand orientation, polymorphic variations at certain positions within a haplotype sometimes are reported from one strand orientation while others are reported from the other. The latter sometimes occurs even though it is understood by the person of ordinary skill in the art that polymorphic variants in a haplotype occur within one strand in a nucleic acid. Where a haplotype is reported from mixed strand orientations, a person of ordinary skill in the art can determine the orientation of each polymorphic variation in the haplotype by analyzing the orientation of each extension oligonucleotide utilized to identify each polymorphic variation.

[0056] In the genetic analyses that associated polymorphic variations in CDK10, FPGT, PCLO or REPS2 with melanoma, samples from individuals having melanoma and individuals not having cancer were allelotyped and genotyped. The term “allelotype” as used herein refers to a process for determining the allele frequency for a polymorphic variant in pooled DNA samples from cases and controls. By pooling DNA from each group, an allele frequency for each SNP in each group is calculated. These allele frequencies are then compared to one another. Particular SNPs are considered as being associated with a particular disease when allele frequency differences calculated between case and control pools are statistically significant. The term “genotyped” as used herein refers to a process for determining a genotype of one or more individuals, where a “genotype” is a representation of one or more polymorphic variants in a population. It was determined that polymorphic variations associated with an increased risk of melanoma existed in CDK10, FPGT, PCLO or REPS2 nucleotide sequences. In specific embodiments, polymorphic variants at the following positions in SEQ ID NO: 1 were associated with an increased risk of melanoma: 139, 3525, 7960, 9640, 14845, 19300, 21338, 21343, 42477, 43164, 43734, 44029, 44986, 53410, 83831, 85666, 88389 and 92523. Of these, variations at postitions 139, 3525, 9640, 21338, 85666, 88389 and 92523 were in particular associated with an increased risk of melanoma in females, and variations at positions 7960, 14845, 19300, 21338, 21343, 42477, 43164, 43734, 44029, 44986, 53410, and 83831 were in particular associated with an increased risk of melanoma in males. Polymorphic variants at the following positions in SEQ ID NO: 2 were associated with an increased risk of melanoma: 17207, 19057, 32252, 33887, 36394, 39184, 40707, 42857, 45812, 46643, 47007, 50015, 50442, 51203, 51983, 57523, 60557, 60645, 64531 and 83870. Of these, variations at postitions 17207, 33887, 36394, 39184, 40707, 42857, 45812, 46643, 50015, 50442, 51203, 57523, 60557, 60645, 64531 and 83870 were in particular associated with an increased risk of melanoma in females, and variations at positions 19057, 32252, 33887, 42857, 46643, 47007, 51983, 60557, 60645, and 83870 were in particular associated with an increased risk of melanoma in males. Polymorphic variants at the following positions in SEQ ID NO: 3 were associated with an increased risk of melanoma: 4029, 5343, 8817, 18596, 18602, 21583, 36594, 37994, 38293, 46972, 48524 and 72488. Of these, variations at postitions 4029, 5343, 8817, 18596, 18602, 21583, 36594, 37994, 46972, 48524 and 72488 were in particular associated with an increased risk of melanoma in females, and variations at positions 21583 and 38293 were in particular associated with an increased risk of melanoma in males. A polymorphic variant at position 38753 in SEQ ID NO: 4 was associated with increased risk of melanoma. At these positions in SEQ ID NOs: 1, 2, 3, and 4, a cytosine at position 139 in SEQ ID NO: 1, a guanine at position 3525 in SEQ ID NO: 1, a thymine at position 7960 in SEQ ID NO: 1, a guanine at position 9640 in SEQ ID NO: 1, a thymine at position 14845 in SEQ ID NO: 1, a cytosine at position 19300 in SEQ ID NO: 1, a cytosine at position 21338 in SEQ ID NO: 1, athymine at position 21343 in SEQ ID NO: 1, aguanine at position 42477 in SEQ ID NO: 1, a thymine at position 43164 in SEQ ID NO: 1, a thymine at position 43734 in SEQ ID NO: 1, an adenine at position 44029 in SEQ ID NO: 1, a thymine at position 44986 in SEQ ID NO: 1, a guanine at position 53410 in SEQ ID NO: 1, a cytosine at position 83831 in SEQ ID NO: 1, a cytosine at position 85666 in SEQ ID NO: 1, a cytosine at position 88389 in SEQ ID NO: 1, a guanine at position 92523 in SEQ ID NO: 1, a thymine at position 17207 in SEQ ID NO: 2, a guanine at position 19057 in SEQ ID NO: 2, a guanine at position 32252 in SEQ ID NO: 2, a thymine at position 33887 in SEQ ID NO: 2, a cytosine at position 36394 in SEQ ID NO: 2, an adenine at position 39184 in SEQ ID NO: 2, a thymine at position 40707 in SEQ ID NO: 2, an adenine at position 42857 in SEQ ID NO: 2, a cytosine at position 45812 in SEQ ID NO: 2, a thymine at position 46643 in SEQ ID NO: 2, a cytosine at position 47007 in SEQ ID NO: 2, a guanine at position 50015 in SEQ ID NO 2, a guanine at position 50442 in SEQ ID NO: 2, an adenine at position 51203 in SEQ ID NO: 2, a guanine at position 51983 in SEQ ID NO: 2, an adenine at position 57523 in SEQ ID NO: 2, an adenine at position 60557 in SEQ ID NO: 2, a thymine at position 60645 in SEQ ID NO: 2, an adenine at position 64531 in SEQ ID NO: 2, a thymine at position 83870 in SEQ ID NO: 2, a cytosine at position 4029 in SEQ ID NO: 3, an adenine at position 5343 in SEQ ID NO: 3, an adenine at position 8817 in SEQ ID NO: 3, a thymine at position 18596 in SEQ ID NO: 3, an adenine at position 18602 in SEQ ID NO: 3, a cytosine at position 21583 in SEQ ID NO: 3, a thymine at position 36594 in SEQ ID NO: 3, a thymine at position 37994 in SEQ ID NO: 3, an adenine at position 38293 in SEQ ID NO: 3, a cytosine at position 46972 in SEQ ID NO: 3, an adenine at position 48524 in SEQ ID NO: 3, a thymine at position 72488 in SEQ ID NO: 3 and a cytosine at position 38753 in SEQ ID NO: 4 were in particular associated with an increased risk of melanoma.

Additional Polymorphic Variants Associated with Melanoma

[0057] Also provided is a method for identifying polymorphic variants proximal to an incident, founder polymorphic variant associated with melanoma. Thus, featured herein are methods for identifying a polymorphic variation associated with melanoma that is proximal to an incident polymorphic variation associated with melanoma, which comprises identifying a polymorphic variant proximal to the incident polymorphic variant associated with melanoma, where the incident polymorphic variant is in a nucleotide sequence set forth in SEQ ID NO: 1, 2, 3 or 4. The nucleotide sequence often comprises a polynucleotide sequence selected from the group consisting of (a) a polynucleotide sequence set forth in SEQ ID NO: 1, 2, 3 or 4; (b) a polynucleotide sequence that encodes a polypeptide having an amino acid sequence encoded by a nucleotide sequence set forth in SEQ ID NO: 1, 2, 3 or 4; and (c) a polynucleotide sequence that encodes a polypeptide having an amino acid sequence that is 90% or more identical to an amino acid sequence encoded by a nucleotide sequence set forth in SEQ ID NO: 1, 2, 3 or 4 or a polynucleotide sequence 90% or more identical to the polynucleotide sequence set forth in SEQ ID NO: 1, 2, 3 or 4. The presence or absence of an association of the proximal polymorphic variant with NIDDM then is determined using a known association method, such as a method described in the Examples hereafter. In an embodiment, the incident polymorphic variant is described in SEQ ID NO: 1, 2, 3 or 4 or in the Examples below. In another embodiment, the proximal polymorphic variant identified sometimes is a publicly disclosed polymorphic variant, which for example, sometimes is published in a publicly available database. In other embodiments, the polymorphic variant identified is not publicly disclosed and is discovered using a known method, including, but not limited to, sequencing a region surrounding the incident polymorphic variant in a group of nucleic samples. Thus, multiple polymorphic variants proximal to an incident polymorphic variant are associated with melanoma using this method.

[0058] The proximal polymorphic variant often is identified in a region surrounding the incident polymorphic variant. In certain embodiments, this surrounding region is about 50 kb flanking the first polymorphic variant (e.g. about 50 kb 5′ of the first polymorphic variant and about 50 kb 3′ of the first polymorphic variant), and the region sometimes is composed of shorter flanking sequences, such as flanking sequences of about 40 kb, about 30 kb, about 25 kb, about 20 kb, about 15 kb, about 10 kb, about 7 kb, about 5 kb, or about 2 kb 5′ and 3′ of the incident polymorphic variant. In other embodiments, the region is composed of longer flanking sequences, such as flanking sequences of about 55 kb, about 60 kb, about 65 kb, about 70 kb, about 75 kb, about 80 kb, about 85 kb, about 90 kb, about 95 kb, or about 100 kb 5′ and 3′ of the incident polymorphic variant.

[0059] In certain embodiments, polymorphic variants associated with melanoma are identified iteratively. For example, a first proximal polymorphic variant is associated with melanoma using the methods described above and then another polymorphic variant proximal to the first proximal polymorphic variant is identified (e.g., publicly disclosed or discovered) and the presence or absence of an association of one or more other polymorphic variants proximal to the first proximal polymorphic variant with melanoma is determined.

[0060] The methods described herein are useful for identifying or discovering additional polymorphic variants that may be used to further characterize a gene, region or loci associated with a condition, a disease (e.g., melanoma), or a disorder. For example, allelotyping or genotyping data from the additional polymorphic variants may be used to identify a functional mutation or a region of linkage disequilibrium. In certain embodiments, polymorphic variants identified or discovered within a region comprising the first polymorphic variant associated with melanoma are genotyped using the genetic methods and sample selection techniques described herein, and it can be determined whether those polymorphic variants are in linkage disequilibrium with the first polymorphic variant. The size of the region in linkage disequilibrium with the first polymorphic variant also can be assessed using these genotyping methods. Thus, provided herein are methods for determining whether a polymorphic variant is in linkage disequilibrium with a first polymorphic variant associated with melanoma, and such information can be used in prognosis methods described herein.

Isolated Nucleic Acids and Variants Thereof

[0061] Featured herein are isolated CDK10, FPGT, PCLO or REPS2 nucleic acids, which include the nucleotide sequence of SEQ ID NO: 1, 2, 3 or 4, CDK10, FPGT, PCLO or REPS2 nucleic acid variants, and substantially identical nucleic acids and fragments of the foregoing. Nucleotide sequences of CDK10, FPGT, PCLO or REPS2 nucleic acids sometimes are referred to herein as “CDK10, FPGT, PCLO or REPS2 nucleotide sequences.” A “CDK10, FPGT, PCLO or REPS2 nucleic acid variant” refers to one allele that may have different polymorphic variations as compared to another allele in another subject or the same subject. A polymorphic variation in the CDK10, FPGT, PCLO or REPS2 nucleic acid variant may be represented on one or both strands in a double-stranded nucleic acid or on one chromosomal complement (heterozygous) or both chromosomal complements (homozygous). A CDK10, FPGT, PCLO or REPS2 nucleic acid may comprise one or more polymorphic variations associated with melanoma described herein.

[0062] As used herein, the term “nucleic acid” includes DNA molecules (e.g., a complementary DNA (cDNA) and genomic DNA (gDNA)) and RNA molecules (e.g., mRNA, rRNA, siRNA and tRNA) and analogs of DNA or RNA, for example, by use of nucleotide analogs. The nucleic acid molecule can be single-stranded and it is often double-stranded. The term “isolated or purified nucleic acid” refers to nucleic acids that are separated from other nucleic acids present in the natural source of the nucleic acid. For example, with regard to genomic DNA, the term “isolated” includes nucleic acids which are separated from the chromosome with which the genomic DNA is naturally associated. An “isolated” nucleic acid is often free of sequences which naturally flank the nucleic acid (i.e., sequences located at the 5′ and/or 3′ ends of the nucleic acid) in the genomic DNA of the organism from which the nucleic acid is derived. For example, in various embodiments, the isolated nucleic acid molecule can contain less than about 5 kb, 4 kb, 3 kb, 2 kb, 1 kb, 0.5 kb or 0.1 kb of 5′ and/or 3′ nucleotide sequences which flank the nucleic acid molecule in genomic DNA of the cell from which the nucleic acid is derived. Moreover, an “isolated” nucleic acid molecule, such as a cDNA molecule, can be substantially free of other cellular material, or culture medium when produced by recombinant techniques, or substantially free of chemical precursors or other chemicals when chemically synthesized. As used herein, the term “CDK10, FPGT, PCLO or REPS2 gene” refers to a nucleotide sequence that encodes a CDK10, FPGT, PCLO or REPS2 polypeptide.

[0063] Also included herein are nucleic acid fragments. These fragments are typically a nucleotide sequence identical to a nucleotide sequence in SEQ ID NO: 1, 2, 3 or 4, a nucleotide sequence substantially identical to a nucleotide sequence in SEQ ID NO: 1, 2, 3 or 4, or a nucleotide sequence that is complementary to the foregoing. The nucleic acid fragment may be identical, substantially identical or homologous to a nucleotide sequence in an exon or an intron in SEQ ID NO: 1, 2, 3 or 4 and may encode a full-length or mature polypeptide, or may encode a domain or part of a domain of a CDK10, FPGT, PCLO or REPS2 polypeptide. Sometimes, the fragment will comprises one or more of the polymorphic variations described herein as being associated with melanoma. The nucleic acid fragment is often 50, 100, or 200 or fewer base pairs in length, and is sometimes about 300, 400, 500, 600, 700, 800, 900, 1000, 1100, 1200, 1300, or 1400 base pairs in length. A nucleic acid fragment that is complementary to a nucleotide sequence identical or substantially identical to the nucleotide sequence of SEQ ID NO: 1, 2, 3 or 4 and hybridizes to such a nucleotide sequence under stringent conditions is often referred to as a “probe.” Nucleic acid fragments often include one or more polymorphic sites, or sometimes have an end that is adjacent to a polymorphic site as described hereafter.

[0064] An example of a nucleic acid fragment is an oligonucleotide. As used herein, the term “oligonucleotide” refers to a nucleic acid comprising about 8 to about 50 covalently linked nucleotides, often comprising from about 8 to about 35 nucleotides, and more often from about 10 to about 25 nucleotides. The backbone and nucleotides within an oligonucleotide may be the same as those of naturally occurring nucleic acids, or analogs or derivatives of naturally occurring nucleic acids, provided that oligonucleotides having such analogs or derivatives retain the ability to hybridize specifically to a nucleic acid comprising a targeted polymorphism. Oligonucleotides described herein may be used as hybridization probes or as components of prognostic or diagnostic assays, for example, as described herein.

[0065] Oligonucleotides are typically synthesized using standard methods and equipment, such as the ABI™3900 High Throughput DNA Synthesizer and the EXPEDITE™ 8909 Nucleic Acid Synthesizer, both of which are available from Applied Biosystems (Foster City, Calif.). Analogs and derivatives are exemplified in U.S. Pat. Nos. 4,469,863; 5,536,821; 5,541,306; 5,637,683; 5,637,684; 5,700,922; 5,717,083; 5,719,262; 5,739,308; 5,773,601; 5,886,165; 5,929,226; 5,977,296; 6,140,482; WO 00/56746; WO 01/14398, and related publications. Methods for synthesizing oligonucleotides comprising such analogs or derivatives are disclosed, for example, in the patent publications cited above and in U.S. Pat. Nos. 5,614,622; 5,739,314; 5,955,599; 5,962,674; 6,117,992; in WO 00/75372; and in related publications.

[0066] Oligonucleotides may also be linked to a second moiety. The second moiety may be an additional nucleotide sequence such as a tail sequence (e.g., a polyadenosine tail), an adapter sequence (e.g., phage M13 universal tail sequence), and others. Alternatively, the second moiety may be a non-nucleotide moiety such as a moiety which facilitates linkage to a solid support or a label to facilitate detection of the oligonucleotide. Such labels include, without limitation, a radioactive label, a fluorescent label, a chemiluminescent label, a paramagnetic label, and the like. The second moiety may be attached to any position of the oligonucleotide, provided the oligonucleotide can hybridize to the nucleic acid comprising the polymorphism.

Uses for Nucleic Acids

[0067] Nucleic acid coding sequences depicted in SEQ ID NO: 1, 2, 3 or 4, or substantially identical sequences thereof, may be used for diagnostic purposes for detection and control of polypeptide expression. Also, included are oligonucleotide sequences such as antisense nucleic acids (e.g., DNA, RNA or PNA), inhibitory RNA and small-interfering RNA (siRNA), and ribozymes that function to inhibit translation of a polypeptide. Antisense techniques and RNA interference techniques are known in the art and are described herein.

[0068] Ribozymes are enzymatic RNA molecules capable of catalyzing the specific cleavage of RNA. The mechanism of ribozyme action involves sequence specific hybridization of the ribozyme molecule to complementary target RNA, followed by endonucleolytic cleavage. For example, hammerhead motif ribozyme molecules may be engineered that specifically and efficiently catalyze endonucleolytic cleavage of RNA sequences encoded by a nucleotide sequence set forth in SEQ ID NO: 1, 2 or 3 or a substantially identical sequence thereof. Specific ribozyme cleavage sites within any potential RNA target are initially identified by scanning the target molecule for ribozyme cleavage sites which include the following sequences, GUA, GUU and GUC. Once identified, short RNA sequences of between fifteen (15) and twenty (20) ribonucleotides corresponding to the region of the target gene containing the cleavage site may be evaluated for predicted structural features such as secondary structure that may render the oligonucleotide sequence unsuitable. The suitability of candidate targets may also be evaluated by testing their accessibility to hybridization with complementary oligonucleotides, using ribonuclease protection assays.

[0069] Antisense RNA and DNA molecules, siRNA and ribozymes may be prepared by any method known in the art for the synthesis of RNA molecules. These include techniques for chemically synthesizing oligodeoxyribonucleotides well known in the art such as solid phase phosphoramidite chemical synthesis. Alternatively, RNA molecules may be generated by in vitro and in vivo transcription of DNA sequences encoding the antisense RNA molecule. Such DNA sequences may be incorporated into a wide variety of vectors which incorporate suitable RNA polymerase promoters such as the T7 or SP6 polymerase promoters. Alternatively, antisense cDNA constructs that synthesize antisense RNA constitutively or inducibly, depending on the promoter used, can be introduced stably into cell lines.

[0070] DNA encoding a polypeptide also may have a number of uses for the diagnosis of diseases, including melanoma, resulting from aberrant expression of a target gene described herein. For example, the nucleic acid sequence may be used in hybridization assays of biopsies or autopsies to diagnose abnormalities of expression or function (e.g., Southern or Northern blot analysis, in situ hybridization assays).

[0071] In addition, the expression of a polypeptide during embryonic development may also be determined using nucleic acid encoding the polypeptide. As addressed, infra, production of functionally impaired polypeptide is the cause of various disease states, melanoma. In situ hybridizations using polypeptide as a probe may be employed to predict problems related to melanoma. Further, as indicated, infra, administration of human active polypeptide, recombinantly produced as described herein, may be used to treat disease states related to functionally impaired polypeptide. Alternatively, gene therapy approaches may be employed to remedy deficiencies of functional polypeptide or to replace or compete with dysfunctional polypeptide.

Expression Vectors, Host Cells, and Genetically Engineered Cells

[0072] Provided herein are nucleic acid vectors, often expression vectors, which contain a CDK10, FPGT, PCLO or REPS2 nucleic acid. As used herein, the term “vector” refers to a nucleic acid molecule capable of transporting another nucleic acid to which it has been linked and can include a plasmid, cosmid, or viral vector. The vector can be capable of autonomous replication or it can integrate into a host DNA. Viral vectors may include replication defective retroviruses, adenoviruses and adeno-associated viruses for example.

[0073] A vector can include a CDK10, FPGT, PCLO or REPS2 nucleic acid in a form suitable for expression of the nucleic acid in a host cell. The recombinant expression vector typically includes one or more regulatory sequences operatively linked to the nucleic acid sequence to be expressed. The term “regulatory sequence” includes promoters, enhancers and other expression control elements (e.g., polyadenylation signals). Regulatory sequences include those that direct constitutive expression of a nucleotide sequence, as well as tissue-specific regulatory and/or inducible sequences. The design of the expression vector can depend on such factors as the choice of the host cell to be transformed, the level of expression of polypeptide desired, and the like. Expression vectors can be introduced into host cells to produce CDK10, FPGT, PCLO or REPS2 polypeptides, including fusion polypeptides, encoded by CDK10, FPGT, PCLO or REPS2 nucleic acids.

[0074] Recombinant expression vectors can be designed for expression of CDK10, FPGT, PCLO or REPS2 polypeptides in prokaryotic or eukaryotic cells. For example, CDK10, FPGT, PCLO or REPS2 polypeptides can be expressed in E. coli, insect cells (e.g., using baculovirus expression vectors), yeast cells, or mammalian cells. Suitable host cells are discussed further in Goeddel, Gene Expression Technology: Methods in Enzymology 185, Academic Press, San Diego, Calif. (1990). Alternatively, the recombinant expression vector can be transcribed and translated in vitro, for example using T7 promoter regulatory sequences and T7 polymerase.

[0075] Expression of polypeptides in prokaryotes is most often carried out in E. coli with vectors containing constitutive or inducible promoters directing the expression of either fusion or non-fusion polypeptides. Fusion vectors add a number of amino acids to a polypeptide encoded therein, usually to the amino terminus of the recombinant polypeptide. Such fusion vectors typically serve three purposes: 1) to increase expression of recombinant polypeptide; 2) to increase the solubility of the recombinant polypeptide; and 3) to aid in the purification of the recombinant polypeptide by acting as a ligand in affinity purification. Often, a proteolytic cleavage site is introduced at the junction of the fusion moiety and the recombinant polypeptide to enable separation of the recombinant polypeptide from the fusion moiety subsequent to purification of the fusion polypeptide. Such enzymes, and their cognate recognition sequences, include Factor Xa, thrombin and enterokinase. Typical fusion expression vectors include pGEX (Pharmacia Biotech Inc; Smith & Johnson, Gene 67: 31-40 (1988)), pMAL (New England Biolabs, Beverly, Mass.) and pRIT5 (Pharmacia, Piscataway, N.J.) which fuse glutathione S-transferase (GST), maltose E binding polypeptide, or polypeptide A, respectively, to the target recombinant polypeptide.

[0076] Purified fusion polypeptides can be used in screening assays and to generate antibodies specific for CDK10, FPGT, PCLO or REPS2 polypeptides. In a therapeutic embodiment, fusion polypeptide expressed in a retroviral expression vector is used to infect bone marrow cells that are subsequently transplanted into irradiated recipients. The pathology of the subject recipient is then examined after sufficient time has passed (e.g., six (6) weeks).

[0077] Expressing the polypeptide in host bacteria with an impaired capacity to proteolytically cleave the recombinant polypeptide is often used to maximize recombinant polypeptide expression (Gottesman, S., Gene Expression Technology: Methods in Enzymology, Academic Press, San Diego, Calif. 185: 119-128 (1990)). Another strategy is to alter the nucleotide sequence of the nucleic acid to be inserted into an expression vector so that the individual codons for each amino acid are those preferentially utilized in E. coli (Wada et al., Nucleic Acids Res. 20: 2111-2118 (1992)). Such alteration of nucleotide sequences can be carried out by standard DNA synthesis techniques.

[0078] When used in mammalian cells, the expression vector's control functions are often provided by viral regulatory elements. For example, commonly used promoters are derived from polyoma, Adenovirus 2, cytomegalovirus and Simian Virus 40. Recombinant mammalian expression vectors are often capable of directing expression of the nucleic acid in a particular cell type (e.g., tissue-specific regulatory elements are used to express the nucleic acid). Non-limiting examples of suitable tissue-specific promoters include an albumin promoter (liver-specific; Pinkert et al., Genes Dev. 1: 268-277 (1987)), lymphoid-specific promoters (Calame & Eaton, Adv. Immunol. 43: 235-275 (1988)), promoters of T cell receptors (Winoto & Baltimore, EMBO J. 8: 729-733 (1989)) promoters of inmunoglobulins (Banerji et al., Cell 33: 729-740 (1983); Queen & Baltimore, Cell 33. 741-748 (1983)), neuron-specific promoters (e.g., the neurofilament promoter; Byrne & Ruddle, Proc. Natl. Acad. Sci. USA 86. 5473-5477 (1989)), pancreas-specific promoters (Edlund et al., Science 230: 912-916 (1985)), and mammary gland-specific promoters (e.g., milk whey promoter; U.S. Pat. No. 4,873,316 and European Application Publication No. 264,166). Developmentally-regulated promoters are sometimes utilized, for example, the murine hox promoters (Kessel & Gruss, Science 249: 374-379 (1990)) and the α-fetopolypeptide promoter (Campes & Tilghman, Genes Dev. 3: 537-546 (1989)).

[0079] A CDK10, FPGT, PCLO or REPS2 nucleic acid may also be cloned into an expression vector in an antisense orientation. Regulatory sequences (e.g., viral promoters and/or enhancers) operatively linked to a CDK10, FPGT, PCLO or REPS2 nucleic acid cloned in the antisense orientation can be chosen for directing constitutive, tissue specific or cell type specific expression of antisense RNA in a variety of cell types. Antisense expression vectors can be in the form of a recombinant plasmid, phagemid or attenuated virus. For a discussion of the regulation of gene expression using antisense genes see Weintraub et al., Antisense RNA as a molecular tool for genetic analysis, Reviews—Trends in Genetics, Vol. 1 (1) (1986).

[0080] Also provided herein are host cells that include a CDK10, FPGT, PCLO or REPS2 nucleic acid within a recombinant expression vector or CDK10, FPGT, PCLO or REPS2 nucleic acid sequence fragments which allow it to homologously recombine into a specific site of the host cell genome. The terms “host cell” and “recombinant host cell” are used interchangeably herein. Such terms refer not only to the particular subject cell but rather also to the progeny or potential progeny of such a cell. Because certain modifications may occur in succeeding generations due to either mutation or environmental influences, such progeny may not, in fact, be identical to the parent cell, but are still included within the scope of the term as used herein. A host cell can be any prokaryotic or eukaryotic cell. For example, a CDK10, FPGT, PCLO or REPS2 polypeptide can be expressed in bacterial cells such as E. coli, insect cells, yeast or mammalian cells (such as Chinese hamster ovary cells (CHO) or COS cells). Other suitable host cells are known to those skilled in the art.

[0081] Vectors can be introduced into host cells via conventional transformation or transfection techniques. As used herein, the terms “transformation” and “transfection” are intended to refer to a variety of art-recognized techniques for introducing foreign nucleic acid (e.g., DNA) into a host cell, including calcium phosphate or calcium chloride co-precipitation, transduction/infection, DEAE-dextran-mediated transfection, lipofection, or electroporation.

[0082] A host cell provided herein can be used to produce (i.e., express) a CDK10, FPGT, PCLO or REPS2 polypeptide. Accordingly, further provided are methods for producing a CDK10, FPGT, PCLO or REPS2 polypeptide using the host cells described herein. In one embodiment, the method includes culturing host cells into which a recombinant expression vector encoding a CDK10, FPGT, PCLO or REPS2 polypeptide has been introduced in a suitable medium such that a CDK10, FPGT, PCLO or REPS2 polypeptide is produced. In another embodiment, the method further includes isolating a CDK10, FPGT, PCLO or REPS2 polypeptide from the medium or the host cell.

[0083] Also provided are cells or purified preparations of cells which include a CDK10, FPGT, PCLO or REPS2 transgene, or which otherwise misexpress CDK10, FPGT, PCLO or REPS2 polypeptide. Cell preparations can consist of human or non-human cells, e.g., rodent cells, e.g., mouse or rat cells, rabbit cells, or pig cells. In embodiments, the cell or cells include a CDK10, FPGT, PCLO or REPS2 transgene (e.g., a heterologous form of a CDK10, FPGT PCLO or REPS2 such as a human gene expressed in non-human cells). The CDK10, FPGT, PCLO or REPS2 transgene can be misexpressed, e.g., overexpressed or underexpressed. In other embodiments, the cell or cells include a gene which misexpress an endogenous CDK10, FPGT, PCLO or REPS2 polypeptide (e.g., expression of a gene is disrupted, also known as a knockout). Such cells can serve as a model for studying disorders which are related to mutated or mis-expressed CDK10, FPGT, PCLO or REPS2 alleles or for use in drug screening. Also provided are human cells (e.g., a hematopoietic stem cells) transformed with a CDK10, FPGT, PCLO or REPS2 nucleic acid.

[0084] Also provided are cells or a purified preparation thereof (e.g., human cells) in which an endogenous CDK10, FPGT, PCLO or REPS2 nucleic acid is under the control of a regulatory sequence that does not normally control the expression of the endogenous CDK10, FPGT, PCLO or REPS2 gene. The expression characteristics of an endogenous gene within a cell (e.g., a cell line or microorganism) can be modified by inserting a heterologous DNA regulatory element into the genome of the cell such that the inserted regulatory element is operably linked to the endogenous CDK10, FPGT, PCLO or REPS2 gene. For example, an endogenous CDK10, FPGT, PCLO or REPS2 gene (e.g., a gene which is “transcriptionally silent,” not normally expressed, or expressed only at very low levels) may be activated by inserting a regulatory element which is capable of promoting the expression of a normally expressed gene product in that cell. Techniques such as targeted homologous recombinations, can be used to insert the heterologous DNA as described in, e.g., Chappel, U.S. Pat. No. 5,272,071; WO 91/06667, published on May 16, 1991.

Transgenic Animals

[0085] Non-human transgenic animals that express a heterologous CDK10, FPGT, PCLO or REPS2 polypeptide (e.g., expressed from a CDK10, FPGT, PCLO or REPS2 nucleic acid isolated from another organism) can be generated. Such animals are useful for studying the function and/or activity of a CDK10, FPGT, PCLO or REPS2 polypeptide and for identifying and/or evaluating modulators of CDK10, FPGT, PCLO or REPS2 nucleic acid and CDK10, FPGT, PCLO or REPS2 polypeptide activity. As used herein, a “transgenic animal” is a non-human animal such as a mammal (e.g., a non-human primate such as chimpanzee, baboon, or macaque; an ungulate such as an equine, bovine, or caprine; or a rodent such as a rat, a mouse, or an Israeli sand rat), a bird (e.g., a chicken or a turkey), an amphibian (e.g., a frog, salamander, or newt), or an insect (e.g., Drosophila melanogaster), in which one or more of the cells of the animal includes a CDK10, FPGT, PCLO or REPS2 transgene. A transgene is exogenous DNA or a rearrangement (e.g.; a deletion of endogenous chromosomal DNA) that is often integrated into or occurs in the genome of cells in a transgenic animal. A transgene can direct expression of an encoded gene product in one or more cell types or tissues of the transgenic animal, and other transgenes can reduce expression (e.g., a knockout). Thus, a transgenic animal can be one in which an endogenous CDK10, FPGT, PCLO or REPS2 gene has been altered by homologous recombination between the endogenous gene and an exogenous DNA molecule introduced into a cell of the animal (e.g., an embryonic cell of the animal) prior to development of the animal.

[0086] Intronic sequences and polyadenylation signals can also be included in the transgene to increase expression efficiency of the transgene. One or more tissue-specific regulatory sequences can be operably linked to a CDK10, FPGT, PCLO or REPS2 transgene to direct expression of a CDK10, FPGT, PCLO or REPS2 polypeptide to particular cells. A transgenic founder animal can be identified based upon the presence of a CDK10, FPGT, PCLO or REPS2 transgene in its genome and/or expression of CDK10, FPGT, PCLO or REPS2 mRNA in tissues or cells of the animals. A transgenic founder animal can then be used to breed additional animals carrying the transgene. Moreover, transgenic animals carrying a transgene encoding a CDK10, FPGT, PCLO or REPS2 polypeptide can further be bred to other transgenic animals carrying other transgenes.

[0087] CDK10, FPGT, PCLO or REPS2 polypeptides can be expressed in transgenic animals or plants by introducing, for example, a nucleic acid encoding the polypeptide into the genome of an animal. In embodiments the nucleic acid is placed under the control of a tissue specific promoter, e.g., a milk or egg specific promoter, and recovered from the milk or eggs produced by the animal. Also included is a population of cells from a transgenic animal.

CDK10, FPGT, PCLO or REPS2 Polypeptides

[0088] Also featured herein are isolated CDK10, FPGT PCLO or REPS2 polypeptides, including proteins and peptides, that include an amino acid sequence set forth in FIGS. 8A-8C, 9, 10A-10B and 11, respectively, or a substantially identical sequence thereof or variant thereof. Isolated CDK10, FPGT, PCLO or REPS2 polypeptides featured herein include both the full-length polypeptide and the mature polypeptide (i.e., the polypeptide minus the signal sequence or propeptide domain). A CDK10, FPGT, PCLO or REPS2 polypeptide is a polypeptide encoded by a CDK10, FPGT, PCLO or REPS2 nucleic acid, where one nucleic acid can encode one or more different polypeptides. An “isolated” or “purified” polypeptide or protein is substantially free of cellular material or other contaminating proteins from the cell or tissue source from which the protein is derived, or substantially free from chemical precursors or other chemicals when chemically synthesized. In one embodiment, the language “substantially free” means preparation of a CDK10, FPGT, PCLO or REPS2 polypeptide or CDK10, FPGT, PCLO or REPS2 polypeptide variant having less than about 30%, 20%, 10% and more preferably 5% (by dry weight), of non-CDK10, FPGT, PCLO or REPS2 polypeptide (also referred to herein as a “contaminating protein”), or of chemical precursors or non-CDK10, FPGT, PCLO or REPS2 chemicals. When the CDK10, FPGT, PCLO or REPS2 polypeptide or a biologically active portion thereof is recombinantly produced, it is also preferably substantially free of culture medium, specifically, where culture medium represents less than about 20%, sometimes less than about 10%, and often less than about 5% of the volume of the polypeptide preparation. Isolated or purified CDK10, FPGT, PCLO or REPS2 polypeptide preparations are sometimes 0.01 milligrams or more or 0.1 milligrams or more, and often 1.0 milligrams or more and 10 milligrams or more in dry weight.

[0089] Further included herein are CDK10, FPGT, PCLO or REPS2 polypeptide fragments. The polypeptide fragment may be a domain or part of a domain of a CDK10, FPGT, PCLO or REPS2 polypeptide. The polypeptide fragment may have increased, decreased or unexpected biological activity. The polypeptide fragment is often 50 or fewer, 100 or fewer, or 200 or fewer amino acids in length, and is sometimes 300, 400, 500, 600, or 700, or fewer amino acids in length.

[0090] Substantially identical polypeptides may depart from the amino acid sequences set forth in FIGS. 8A-8C, 9, 10A-10B and 11 in different manners. For example, conservative amino acid modifications may be introduced at one or more positions in the amino acid sequences of FIGS. 8A-8C, 9, 10A-10B and 11. A “conservative amino acid substitution” is one in which the amino acid is replaced by another amino acid having a similar structure and/or chemical function. Families of amino acid residues having similar structures and functions are well known. These families include amino acids with basic side chains (e.g., lysine, arginine, histidine), acidic side chains (e.g., aspartic acid, glutamic acid), uncharged polar side chains (e.g., glycine, asparagine, glutamine, serine, threonine, tyrosine, cysteine), nonpolar side chains (e.g., alanine, valine, leucine, isoleucine, proline, phenylalanine, methionine, tryptophan), beta-branched side chains (e.g., threonine, valine, isoleucine) and aromatic side chains (e.g., tyrosine, phenylalanine, tryptophan, histidine). Also, essential and non-essential amino acids may be replaced. A “non-essential” amino acid is one that can be altered without abolishing or substantially altering the biological function of a CDK10, FPGT, PCLO or REPS2 polypeptide, whereas altering an “essential” amino acid abolishes or substantially alters the biological function of a CDK10, FPGT, PCLO or REPS2 polypeptide. Amino acids that are conserved among CDK10, FPGT, PCLO or REPS2 polypeptides are typically essential amino acids.

[0091] Also, CDK10, FPGT, PCLO or REPS2 polypeptides and polypeptide variants may exist as chimeric or fusion polypeptides. As used herein, a CDK10, FPGT, PCLO or REPS2 “chimeric polypeptide” or “fusion polypeptide” includes a CDK10, FPGT, PCLO or REPS2 polypeptide linked to a non-CDK10, FPGT, PCLO or REPS2 polypeptide. A “non-CDK10, FPGT, PCLO or REPS2 polypeptide” refers to a polypeptide having an amino acid sequence corresponding to a polypeptide which is not substantially identical to the CDK10, FPGT, PCLO or REPS2 polypeptide, which includes, for example, a polypeptide that is different from the CDK10, FPGT, PCLO or REPS2 polypeptide and derived from the same or a different organism. The CDK10, FPGT, PCLO or REPS2 polypeptide in the fusion polypeptide can correspond to an entire or nearly entire CDK10, FPGT,PCLO or REPS2 polypeptide or a fragment thereof: The non-CDK10, FPGT, PCLO or REPS2 polypeptide can be fused to the N-terminus or C-terminus of the CDK10, FPGT, PCLO or REPS2 polypeptide.

[0092] Fusion polypeptides can include a moiety having high affinity for a ligand. For example, the fusion polypeptide can be a GST-CDK10, FPGT, PCLO or REPS2 fusion polypeptide in which the CDK10, FPGT, PCLO or REPS2 sequences are fused to the C-terminus of the GST sequences, or a polyhistidine-CDK10, FPGT, PCLO or REPS2 fusion polypeptide in which the CDK10, FPGT, PCLO or REPS2 polypeptide is fused at the N- or C-terminus to a string of histidine residues. Such fusion polypeptides can facilitate purification of recombinant CDK10, FPGT, PCLO or REPS2. Expression vectors are commercially available that already encode a fusion moiety (e.g., a GST polypeptide), and a CDK10, FPGT, PCLO or REPS2 nucleic acid can be cloned into an expression vector such that the fusion moiety is linked in-frame to the CDK10, FPGT, PCLO or REPS2 polypeptide. Further, the fusion polypeptide can be a CDK10, FPGT, PCLO or REPS2 polypeptide containing a heterologous signal sequence at its N-terminus. In certain host cells (e.g., mammalian host cells), expression, secretion, cellular internalization, and cellular localization of a CDK10, FPGT, PCLO or REPS2 polypeptide can be increased through use of a heterologous signal sequence. Fusion polypeptides can also include all or a part of a serum polypeptide (e.g., an IgG constant region or human serum albumin).

[0093] CDK10, FPGT, PCLO or REPS2 polypeptides or fragments thereof can be incorporated into pharmaceutical compositions and administered to a subject in vivo. Administration of these CDK10, FPGT, PCLO or REPS2 polypeptides can be used to affect the bioavailability of a CDK10, FPGT, PCLO or REPS2 substrate and may effectively increase CDK10, FPGT, PCLO or REPS2 biological activity in a cell. CDK10, FPGT, PCLO or REPS2 fusion polypeptides may be useful therapeutically for the treatment of disorders caused by, for example, (i) aberrant modification or mutation of a gene encoding a CDK10, FPGT, PCLO or REPS2 polypeptide; (ii) mis-regulation of the CDK10, FPGT, PCLO or REPS2 gene; and (iii) aberrant post-translational modification of a CDK10, FPGT, PCLO or REPS2 polypeptide. Also, CDK10, FPGT, PCLO or REPS2 polypeptides can be used as immunogens to produce anti-CDK10, FPGT, PCLO or REPS2 antibodies in a subject, to purify CDK10, FPGT, PCLO or REPS2 ligands or binding partners, and in screening assays to identify molecules which inhibit or enhance the interaction of CDK10, FPGT, PCLO or REPS2 with a CDK10, FPGT, PCLO or REPS2 substrate.

[0094] In addition, polypeptides can be chemically synthesized using techniques known in the art (See, e.g., Creighton, 1983 Proteins. New York, N.Y.: W. H. Freeman and Company; and Hunkapiller et al., (1984) Nature July 12-18;310(5973):105-11). For example, a relative short fragment can be synthesized by use of a peptide synthesizer. Furthermore, if desired, nonclassical amino acids or chemical amino acid analogs can be introduced as a substitution or addition into the fragment sequence. Non-classical amino acids include, but are not limited to, to the D-isomers of the common amino acids, 2,4-diaminobutyric acid, a-amino isobutyric acid, 4-aminobutyric acid, Abu, 2-amino butyric acid, g-Abu, e-Ahx, 6-amino hexanoic acid, Aib, 2-amino isobutyric acid, 3-amino propionic acid, ornithine, norleucine, norvaline, hydroxyproline, sarcosine, citrulline, homocitrulline, cysteic acid, t-butylglycine, t-butylalanine, phenylglycine, cyclohexylalanine, b-alanine, fluoroamino acids, designer amino acids such as b-methyl amino acids, Ca-methyl amino acids, Na-methyl amino acids, and amino acid analogs in general. Furthermore, the amino acid can be D (dextrorotary) or L (levorotary).

[0095] Polypeptides and polypeptide fragments sometimes are differentially modified during or after translation, e.g., by glycosylation, acetylation, phosphorylation, amidation, derivatization by known protecting/blocking groups, proteolytic cleavage, linkage to an antibody molecule or other cellular ligand, etc. Any of numerous chemical modifications may be carried out by known techniques, including but not limited, to specific chemical cleavage by cyanogen bromide, trypsin, chymotrypsin, papain, V8 protease, NaBH4; acetylation, formylation, oxidation, reduction; metabolic synthesis in the presence of tunicamycin; and the like. Additional post-translational modifications include, for example, N-linked or O-linked carbohydrate chains, processing of N-terminal or C-terminal ends), attachment of chemical moieties to the amino acid backbone, chemical modifications of N-linked or O-linked carbohydrate chains, and addition or deletion of an N-terminal methionine residue as a result of procaryotic host cell expression. The polypeptide fragments may also be modified with a detectable label, such as an enzymatic, fluorescent, isotopic or affinity label to allow for detection and isolation of the polypeptide.

[0096] Also provided are chemically modified derivatives of polypeptides that can provide additional advantages such as increased solubility, stability and circulating time of the polypeptide, or decreased immunogenicity (see e.g., U.S. Pat. No. 4,179,337). The chemical moieties for derivitization may be selected from water soluble polymers such as polyethylene glycol, ethylene glycol/propylene glycol copolymers, carboxymethylcellulose, dextran, polyvinyl alcohol and the like. The polypeptides may be modified at random positions within the molecule, or at predetermined positions within the molecule and may include one, two, three or more attached chemical moieties.

[0097] The polymer may be of any molecular weight, and may be branched or unbranched. For polyethylene glycol, the molecular weight often utilized is between about 1 kDa and about 100 kDa (the term “about” indicating that in preparations of polyethylene glycol, some molecules will weigh more, some less, than the stated molecular weight) for ease in handling and manufacturing. Other sizes may be used, depending on the desired therapeutic profile (e.g., the duration of sustained release desired, the effects, if any on biological activity, the ease in handling, the degree or lack of antigenicity and other known effects of the polyethylene glycol to a therapeutic protein or analog).

[0098] The polymers should be attached to the polypeptide with consideration of effects on functional or antigenic domains of the polypeptide. There are a number of attachment methods available to those skilled in the art (e.g., EP 0 401 384 (coupling PEG to G-CSF) and Malik et al. (1992) Exp. Hematol. September;20(8):1028-35 (pegylation of GM-CSF using tresyl chloride)). For example, polyethylene glycol may be covalently bound through amino acid residues via a reactive group, such as a free amino or carboxyl group. Reactive groups are those to which an activated polyethylene glycol molecule may be bound. The amino acid residues having a free amino group may include lysine residues and the N-terminal amino acid residues; those having a free carboxyl group may include aspartic acid residues, glutamic acid residues and the C-terminal amino acid residue. Sulfhydryl groups may also be used as a reactive group for attaching the polyethylene glycol molecules. For therapeutic purposes, the attachment sometimes is at an amino group, such as attachment at the N-terminus or lysine group.

[0099] Proteins can be chemically modified at the N-terminus. Using polyethylene glycol as an illustration of such a composition, one may select from a variety of polyethylene glycol molecules (by molecular weight, branching, etc.), the proportion of polyethylene glycol molecules to protein (polypeptide) molecules in the reaction mix, the type of pegylation reaction to be performed, and the method of obtaining the selected N-terminally pegylated protein. The method of obtaining the N-terminally pegylated preparation (i.e., separating this moiety from other monopegylated moieties if necessary) may be by purification of the N-terminally pegylated material from a population of pegylated protein molecules. Selective proteins chemically modified at the N-terminus may be accomplished by reductive alkylation, which exploits differential reactivity of different types of primary amino groups (lysine versus the N-terminal) available for derivatization in a particular protein. Under the appropriate reaction conditions, substantially selective derivatization of the protein at the N-terminus with a carbonyl group containing polymer is achieved.

Substantially Identical CDK10, FPGT, PCLO or REPS2 Nucleic Acids and Polypeptides

[0100] CDK10, FPGT, PCLO or REPS2 nucleotide sequences and CDK10, FPGT, PCLO or REPS2 polypeptide sequences that are substantially identical to the nucleotide sequence of SEQ ID NO: 1, 2, 3 or 4 and the polypeptide sequences of FIGS. 8A-8C, 9, 10A-10B and 11, respectively, are included herein. The term “substantially identical” as used herein refers to two or more nucleic acids or polypeptides sharing one or more identical nucleotide sequences or polypeptide sequences, respectively. Included are nucleotide sequences or polypeptide sequences that are 55%, 60%, 65%, 70%, 75%, 80%, 85%, 90%, 95% or more (each often within a 1%, 2%, 3% or 4% variability) identical to the CDK10, FPGT, PCLO or REPS2 nucleotide sequencein SEQ ID NO: 1, 2, 3 or 4 or the CDK10, FPGT, PCLO or REPS2 polypepuide sequences of FIGS. 8A-8C, 9, 10A-10B and 11. One test for determining whether two nucleic acids are substantially identical is to determine the percent of identical nucleotide sequences or polypeptide sequences shared between the nucleic acids or polypeptides.

[0101] Calculations of sequence identity are often performed as follows. Sequences are aligned for optimal comparison purposes (e.g., gaps can be introduced in one or both of a first and a second amino acid or nucleic acid sequence for optimal alignment and non-homologous sequences can be disregarded for comparison purposes). The length of a reference sequence aligned for comparison purposes is sometimes 30% or more, 40% or more, 50% or more, often 60% or more, and more often 70%, 80%, 90%, 100% of the length of the reference sequence. The nucleotides or amino acids at corresponding nucleotide or polypeptide positions, respectively, are then compared among the two sequences. When a position in the first sequence is occupied by the same nucleotide or amino acid as the corresponding position in the second sequence, the nucleotides or amino acids are deemed to be identical at that position. The percent identity between the two sequences is a function of the number of identical positions shared by the sequences, taking into account the number of gaps, and the length of each gap, introduced for optimal alignment of the two sequences.

[0102] Comparison of sequences and determination of percent identity between two sequences can be accomplished using a mathematical algorithm. Percent identity between two amino acid or nucleotide sequences can be determined using the algorithm of Meyers & Miller, CABIOS 4: 11-17 (1989), which has been incorporated into the ALIGN program (version 2.0), using a PAM120 weight residue table, a gap length penalty of 12 and a gap penalty of 4. Also, percent identity between two amino acid sequences can be determined using the Needleman & Wunsch, J. Mol. Biol. 48: 444-453 (1970) algorithm which has been incorporated into the GAP program in the GCG software package (available at the http address www.gcg.com), using either a Blossum 62 matrix or a PAM250 matrix, and a gap weight of 16, 14, 12, 10, 8, 6, or 4 and a length weight of 1, 2, 3, 4, 5, or 6. Percent identity between two nucleotide sequences can be determined using the GAP program in the GCG software package (available at http address www.gcg.com), using a NWSgapdna.CMP matrix and a gap weight of 40, 50, 60, 70, or 80 and a length weight of 1, 2, 3, 4, 5, or 6. A set of parameters often used is a Blossum 62 scoring matrix with a gap open penalty of 12, a gap extend penalty of 4, and a frameshift gap penalty of 5.

[0103] Another manner for determining if two nucleic acids are substantially identical is to assess whether a polynucleotide homologous to one nucleic acid will hybridize to the other nucleic acid under stringent conditions. As use herein, the term “stringent conditions” refers to conditions for hybridization and washing. Stringent conditions are known to those skilled in the art and can be found in Current Protocols in Molecular Biology, John Wiley & Sons, N.Y.,6.3.1-6.3.6 (1989). Aqueous and non-aqueous methods are described in that reference and either can be used. An example of stringent hybridization conditions is hybridization in 6× sodium chloride/sodium citrate (SSC) at about 45° C., followed by one or more washes in 0.2×SSC, 0.1% SDS at 50° C. Another example of stringent hybridization conditions are hybridization in 6× sodium chloride/sodium citrate (SSC) at about 45° C., followed by one or more washes in 0.2×SSC, 0.1% SDS at 55° C. A further example of stringent hybridization conditions is hybridization in 6× sodium chloride/sodium citrate (SSC) at about 45° C., followed by one or more washes in 0.2×SSC, 0.1% SDS at 60° C. Often, stringent hybridization conditions are hybridization in 6× sodium chloride/sodium citrate (SSC) at about 45° C., followed by one or more washes in 0.2×SSC, 0.1% SDS at 65° C. More often, stringency conditions are 0.5M sodium phosphate, 7% SDS at 65° C., followed by one or more washes at 0.2×SSC, 1% SDS at 65° C.

[0104] An example of a substantially identical nucleotide sequence to SEQ ID NO: 1, 2, 3 or 4 is one that has a different nucleotide sequence and still encodes a polypeptide sequence set forth in FIGS. 8A-8C, 9, 10A-10B and 11. Another example is a nucleotide sequence that encodes a polypeptide having a polypeptide sequence that is more than 70% identical to, sometimes more than 75%, 80%, or 85% identical to, and often more than 90% and 95% or more identical to the polypeptide sequences set forth in FIGS. 8A-8C, 9, 10A-10B and 11.

[0105] CDK10, FPGT, PCLO or REPS2 nucleotide sequences and polypeptide sequences can be used as “query sequences” to perform a search against public databases to identify other family members or related sequences, for example. Such searches can be performed using the NBLAST and XBLAST programs (version 2.0) of Altschul et al., J. Mol. Biol. 215: 403-10 (1990). BLAST nucleotide searches can be performed with the NBLAST program, score=100, wordlength=12 to obtain nucleotide sequences homologous to CDK10, FPGT, PCLO or REPS2 nucleic acid molecules. BLAST polypeptide searches can be performed with the XBLAST program, score=50, wordlength=3 to obtain amino acid sequences homologous to CDK10, FPGT, PCLO or REPS2 polypeptides. To obtain gapped alignments for comparison purposes, Gapped BLAST can be utilized as described in Altschul et al., Nucleic Acids Res. 25(17): 3389-3402 (1997). When utilizing BLAST and Gapped BLAST programs, default parameters of the respective programs (e.g., XBLAST and NBLAST) can be used (see the http address www.ncbi.nlm.nih.gov).

[0106] A nucleic acid that is substantially identical to the nucleotide sequence of SEQ ID NO: 1, 2, 3 or 4 may include polymorphic sites at positions equivalent to those described herein (e.g., position 146311 in SEQ ID NO: 1, 2, 3 or 4) when the sequences are aligned. For example, using the alignment procedures described herein, SNPs in a sequence substantially identical to the sequence of SEQ ID NO: 1, 2, 3 or 4 can be identified at nucleotide positions that match (i.e., align) with nucleotides at SNP positions in SEQ ID NO: 1, 2, 3 or 4. Also, where a polymorphic variation is an insertion or deletion, insertion or deletion of a nucleotide sequence from a reference sequence can change the relative positions of other polymorphic sites in the nucleotide sequence.

[0107] Substantially identical CDK10, FPGT, PCLO or REPS2 nucleotide and polypeptide sequences include those that are naturally occurring, such as allelic variants (same locus), splice variants, homologs (different locus), and orthologs (different organism) or can be non-naturally occurring. Non-naturally occurring variants can be generated by mutagenesis techniques, including those applied to polynucleotides, cells, or organisms. The variants can contain nucleotide substitutions, deletions, inversions and insertions. Variation can occur in either or both the coding and non-coding regions. The variations can produce both conservative and non-conservative amino acid substitutions (as compared in the encoded product). Orthologs, homologs, allelic variants, and splice variants can be identified using methods known in the art. These variants normally comprise a nucleotide sequence encoding a polypeptide that is 50%, about 55% or more, often about 70-75% or more, more often about 80-85% or more, and typically about 90-95% or more identical to the amino acid sequences shown in FIGS. 8A-8C, 9, 10A-10B and 11 or a fragment thereof. Such nucleic acid molecules can readily be identified as being able to hybridize under stringent conditions to the nucleotide sequence shown in SEQ ID NO: 1, 2, 3 or 4 or a fragment of this sequence. Nucleic acid molecules corresponding to orthologs, homologs, and allelic variants of the CDK10, FPGT, PCLO or REPS2 nucleotide sequence can further be identified by mapping the sequence to the same chromosome or locus as the CDK10, FPGT, PCLO or REPS2 nucleotide sequence or variant.

[0108] Also, substantially identical CDK10, FPGT, PCLO or REPS2 nucleotide sequences may include codons that are altered with respect to the naturally occurring sequence for enhancing expression of a CDK10, FPGT, PCLO or REPS2 polypeptide or polypeptide variant in a particular expression system. For example, the nucleic acid can be one in which one or more codons are altered, and often 10% or more or 20% or more of the codons are altered for optimized expression in bacteria (e.g., E. coli.), yeast (e.g., S. cervesiae), human (e.g., 293 cells), insect, or rodent (e.g., hamster) cells.

Methods for Identifying Subjects at Risk of Melanoma and Risk of Melanoma

[0109] Methods for determining whether a subject is at risk of melanoma are provided herein. These methods include detecting the presence or absence of one or more polymorphic variations associated with melanoma in a CDK10, FPGT, PCLO or REPS2 nucleotide sequence, or substantially identical sequence thereof, in a sample from a subject, where the presence of such a polymorphic variation is indicative of the subject being at risk of melanoma. These genetic tests are useful for prognosing and/or diagnosing melanoma and often are useful for determining whether an individual is at an increased, intermediate or decreased risk of developing or having melanoma.

[0110] Thus, featured herein is a method for identifying a subject at risk of melanoma; which comprises detecting in a nucleic acid sample from the subject the presence or absence of a polymorphic variation associated with melanoma at a polymorphic site in a CDK10, FPGT, PCLO or REPS2 nucleotide sequence. The nucleotide sequence often is selected from the group consisting of: (a) a nucleotide sequence of SEQ ID NO: 1, 2, 3 or 4; (b) a nucleotide sequence which encodes a polypeptide consisting of the amino acid sequence encoded by the nucleotide sequence of SEQ ID NO: 1, 2, 3 or 4; (c) a nucleotide sequence which encodes a polypeptide that is 90% or more identical to the amino acid sequence encoded by the nucleotide sequence of SEQ ID NO: 1, 2, 3 or 4; and (d) a fragment of a nucleotide sequence of (a), (b), or (c), where the fragment often comprises a polymorphic site; whereby the presence of the polymorphic variation is indicative of the subject being at risk of melanoma. A polymorphic variation assayed in the genetic test often is located in an intron, sometimes in a region surrounding the CDK10, FPGT, PCLO or REPS2 open reading frame (e.g., within 50 kilobases (kb), 40 kb, 30 kb, 20 kb, 15, kb, 10 kb, 5 kb, 4 kb, 3 kb, 2 kb, or 1 kb of the open reading frame initiation site or termination site), and sometimes in an exon. Sometimes the polymorphic variation is not located in an exon (e.g., it sometimes is located in an intron or region upstream or downstream of a terminal intron or exon).

[0111] Results from such genetic tests may be combined with other test results to diagnose melanoma. For example, genetic test results may be gathered, a patient sample may be ordered based on a determined predisposition to melanoma (e.g., a skin biopsy), the patient sample is analyzed, and the results of the analysis may be utilized to diagnose melanoma. Also, melanoma diagnostic tests are generated by stratifying populations into subpopulations having different progressions of melanoma and detecting polymorphic variations associated with different progressions of the melanoma, as described in further detail hereafter. In another embodiment, genetic test results are gathered, a patient's risk factors for developing melanoma are analyzed (e.g., exposure to sun and skin pigmentation), and a patient sample may be ordered based on a determined risk of melanoma.

[0112] Risk of melanoma sometimes is expressed as a probability, such as an odds ratio, percentage, or risk factor. The risk assessment is based upon the presence or absence of one or more polymorphic variants described herein, and also may be based in part upon phenotypic traits of the individual being tested. Methods for calculating risks based upon patient data are well known (see, e.g., Agresti, Categorical Data Analysis, 2nd Ed. 2002. Wiley). Allelotyping and genotyping analyses may be carried out in populations other than those exemplified herein to enhance the predictive power of the prognostic method. These further analyses are executed in view of the exemplified procedures described herein, and may be based upon the same polymorphic variations or additional polymorphic variations.

[0113] The nucleic acid sample typically is isolated from a biological sample obtained from a subject. For example, nucleic acid can be isolated from blood, saliva, sputum, urine, cell scrapings, and biopsy tissue. The nucleic acid sample can be isolated from a biological sample using standard techniques, such as the technique described in Example 2. As used herein, the term “subject” refers primarily to humans but also refers to other mammals such as dogs, cats, and ungulates (e.g., cattle, sheep, and swine). Subjects also include avians (e.g., chickens and turkeys), reptiles, and fish (e.g., salmon), as embodiments described herein can be adapted to nucleic acid samples isolated from any of these organisms. The nucleic acid sample may be isolated from the subject and then directly utilized in a method for determining the presence of a polymorphic variant, or alternatively, the sample may be isolated and then stored (e.g., frozen) for a period of time before being subjected to analysis.

[0114] The presence or absence of a polymorphic variant is determined using one or both chromosomal complements represented in the nucleic acid sample. Determining the presence or absence of a polymorphic variant in both chromosomal complements represented in a nucleic acid sample from a subject having a copy of each chromosome is useful for determining the zygosity of an individual for the polymorphic variant (i.e., whether the individual is homozygous or heterozygous for the polymorphic variant). Any oligonucleotide-based diagnostic may be utilized to determine whether a sample includes the presence or absence of a polymorphic variant in a sample. For example, primer extension methods, ligase sequence determination methods (e.g., U.S. Pat. Nos. 5,679,524 and 5,952,174, and WO 01/27326), mismatch sequence determination methods (e.g., U.S. Pat. Nos. 5,851,770; 5,958,692; 6,110,684; and 6,183,958), microarray sequence determination methods, restriction fragment length polymorphism (RFLP), single strand conformation polymorphism detection (SSCP) (e.g., U.S. Pat. Nos. 5,891,625 and 6,013,499), PCR-based assays (e.g., TAQMAN® PCR System (Applied Biosystems)), and nucleotide sequencing methods may be used.

[0115] Oligonucleotide extension methods typically involve providing a pair of oligonucleotide primers in a polymerase chain reaction (PCR) or in other nucleic acid amplification methods for the purpose of amplifying a region from the nucleic acid sample that comprises the polymorphic variation. One oligonucleotide primer is complementary to a region 3′ of the polymorphism and the other is complementary to a region 5′ of the polymorphism. A PCR primer pair may be used in methods disclosed in U.S. Pat. Nos. 4,683,195; 4,683,202, 4,965,188; 5,656,493; 5,998,143; 6,140,054; WO 01/27327; and WO 01/27329 for example. PCR primer pairs may also be used in any commercially available machines that perform PCR, such as any of the GENEAMP® Systems available from Applied Biosystems. Also, those of ordinary skill in the art will be able to design oligonucleotide primers based upon the nucleotide sequence of SEQ ID NO: 1, 2, 3 or 4 without undue experimentation using knowledge readily available in the art.

[0116] Also provided are extension oligonucleotides that hybridize to the amplified fragment adjacent to the polymorphic variation. As used herein, the term “adjacent” refers to the 3′ end of the extension oligonucleotide being sometimes 1 nucleotide from the 5′ end of the polymorphic site, often 2 or 3, and at times 4, 5, 6, 7, 8, 9, or 10 nucleotides from the 5′ end of the polymorphic site, in the nucleic acid when the extension oligonucleotide is hybridized to the nucleic acid. The extension oligonucleotide then is extended by one or more nucleotides, often 2 or 3 nucleotides, and the number and/or type of nucleotides that are added to the extension oligonucleotide determine whether the polymorphic variant is present. Oligonucleotide extension methods are disclosed, for example, in U.S. Pat. Nos. 4,656,127; 4,851,331; 5,679,524; 5,834,189; 5,876,934; 5,908,755; 5,912,118; 5,976,802; 5,981,186; 6,004,744; 6,013,431; 6,017,702; 6,046,005; 6,087,095; 6,210,891; and WO 01/20039. Oligonucleotide extension methods using mass spectrometry are described, for example, in U.S. Pat. Nos. 5,547,835; 5,605,798; 5,691,141; 5,849,542; 5,869,242; 5,928,906; 6,043,031; and 6,194,144, and a method often utilized is described herein in Example 2.

[0117] A microarray can be utilized for determining whether a polymorphic variant is present or absent in a nucleic acid sample. A microarray sometimes includes an oligonucleotides described herein, and methods for making and using oligonucleotide microarrays suitable for prognostic use are disclosed in U.S. Pat. Nos. 5,492,806; 5,525,464; 5,589,330; 5,695,940; 5,849,483; 6,018,041; 6,045,996; 6,136,541; 6,142,681; 6,156,501; 6,197,506; 6,223,127; 6,225,625; 6,229,911; 6,239,273; WO 00/52625; WO 01/25485; and WO 01/29259. The microarray typically comprises a solid support and the oligonucleotides sometimes are linked to the solid support by covalent or non-covalent interactions. The oligonucleotides sometimes are linked to the solid support directly or by a spacer molecule. A microarray sometimes comprise one or more oligonucleotides complementary to a portion of SEQ ID NO: 1, 2, 3 or 4, or complementary to a variant described herein.

[0118] A kit may also be utilized for determining whether a polymorphic variant is present or absent in a nucleic acid sample. A kit often comprises one or more pairs of oligonucleotide primers useful for amplifying a fragment of SEQ ID NO: 1, 2, 3 or 4 or a substantially identical sequence thereof, where the fragment includes a polymorphic site. The kit sometimes comprises a polymerizing agent, for example, a thermostable nucleic acid polymerase such as one disclosed in U.S. Pat. Nos. 4,889,818 or 6,077,664. Also, the kit often comprises an elongation oligonucleotide that hybridizes to a CDK10, FPGT, PCLO or REPS2 nucleic acid in a nucleic acid sample adjacent to the polymorphic site. Where the kit includes an elongation oligonucleotide, it also often comprises chain elongating nucleotides, such as dATP, dTTP, dGTP, dCTP, and dITP, including analogs of dATP, dTTP, dGTP, dCTP and dITP, provided that such analogs are substrates for a thermostable nucleic acid polymerase and can be incorporated into a nucleic acid chain elongated from the extension oligonucleotide; Along with chain elongating nucleotides would be one or more chain terminating nucleotides such as ddATP, ddTTP, ddGTP, ddCTP, and the like. In an embodiment, the kit comprises one or more oligonucleotide primer pairs, a polymerizing agent, chain elongating nucleotides, at least one elongation oligonucleotide, and one or more chain terminating nucleotides. Kits optionally include buffers, vials, microtitre plates, and instructions for use. CDK10, FPGT, PCLO or REPS2 directed hits may be utilized to prognose or diagnose melanoma for a significant fraction of melanoma occurrences, such as in 50% or more melanoma occurrences, or sometimes 60% or more, 70% or more, 80% or more, 90% or more, or 95% or more melanoma occurrences.

[0119] Using a polymorphism detection technology (e.g., a technique described above or below in Example 2), mutations and polymorphisms in or around the CDK10, FPGT, PCLO or REPS2 locus may be detected in melanocytic lesions, which include nevi, radial growth phase (RGP) melanomas, vertical growth phase (VGP) melanomas, and melanoma metastases. The mutations can be detected within 50 kilobases (kb), 40 kb, 30 kb, 20 kb, 15, kb, 10 kb, 5 kb, 4 kb, 3 kb, 2 kb, or 1 kb from the CDK10, FPGT, PCLO or REPS2 open reading frame initiation or termination site. Therefore, provided herein are methods for genotyping CDK10, FPGT, PCLO or REPS2 mutations in melanocytic lesions and metastases (e.g., described in Example 2). Mutations in or around the CDK10, FPGT, PCLO or REPS2 loci present in later stage melanomas, such as VGP melanomas and melanoma metastases, are indicative of melanomas particularly likely to continue to progress and/or metastasize (e.g., from RGP to VGP melanoma or melanoma metastases), i.e., aggressive melanomas. Thus, provided herein are methods for identifying subjects at risk of a progressive or aggressive melanoma by determining the presence or absence of one or more CDK10, FPGT, PCLO or REPS2 mutations in the DNA sample of a subject that exist in melanocytic lesions and/or metastases. Identifying the presence of one or more of these mutations is useful for identifying subjects in need of aggressive treatments of melanoma, and once identified using such methods, a subject often is given information concerning preventions and treatments of the disease, and sometimes is treated with an aggressive melanoma treatment method (e.g., surgery or administration of drugs), as described in more detail hereafter.

[0120] Determining the presence of a polymorphic variant, or a combination of two or more polymorphic variants, in a nucleic acid set forth in SEQ ID NOs: 1, 2, 3 and/or 4 of the sample often is indicative of a predisposition to melanoma. In certain embodiments, nucleic acid variants of other loci, such as the BRAF locus described in U.S. application Ser. No. 10/661,966 filed Sep. 11, 2003 and any loci described in the concurrently filed applications directed to melanoma (e.g., NRP1, NID2 and ENDO180), are detected in combination with one or more nucleic acid variants in the CDK10, FPGT, PCLO or REPS2 loci.

[0121] As noted above, a cytosine at position 139 in SEQ ID NO: 1, a guanine at position 3525 in SEQ ID NO: 1, a thymine at position 7960 in SEQ ID NO: 1, a guanine at position 9640 in SEQ ID NO: 1, a thymine at position 14845 in SEQ ID NO: 1, a cytosine at position 19300 in SEQ ID NO: 1, a cytosine at position 21338 in SEQ ID NO: 1, a thymine at position 21343 in SEQ ID NO: 1, a guanine at position 42477 in SEQ ID NO: 1, a thymine at position 43164 in SEQ ID NO: 1, a thymine at position 43734 in SEQ ID NO: 1, an adenine at position 44029 in SEQ ID NO: 1, a thymine at position 44986 in SEQ ID NO: 1, a guanine at position 53410 in SEQ ID NO: 1, a cytosine at position 83831 in SEQ ID NO: 1, a cytosine at position 85666 in SEQ ID NO: 1, a cytosine at position 88389 in SEQ ID NO: 1, a guanine at position 92523 in SEQ ID NO: 1, a thymine at position 17207 in SEQ ID NO: 2, a guanine at position 19057 in SEQ ID NO: 2, a guanine at position 32252 in SEQ ID NO: 2, a thymine at position 33887 in SEQ ID NO: 2, a cytosine at position 36394 in SEQ ID NO: 2, an adenine at position 39184 in SEQ ID NO: 2, a thymine at position 40707 in SEQ ID NO: 2, an adenine at position 42857 in SEQ ID NO: 2, a cytosine at position 45812 in SEQ ID NO: 2, a thymine at position 46643 in SEQ ID NO: 2, a cytosine at position 47007 in SEQ ID NO: 2, a guanine at position 50015 in SEQ ID NO: 2, a guanine at position 50442 in SEQ ID NO: 2, an adenine at position 51203 in SEQ ID NO: 2, a guanine at position 51983 in SEQ ID NO: 2, an adenine at position 57523 in SEQ ID NO: 2, an adenine at position 60557 in SEQ ID NO: 2, a thymine at position 60645 in SEQ ID NO: 2, an adenine at position 64531 in SEQ ID NO: 2, a thymine at position 83870 in SEQ ID NO: 2, a cytosine at position 4029 in SEQ ID NO: 3, an adenine at position 5343 in SEQ ID NO: 3, an adenine at position 8817 in SEQ ID NO: 3, a thymine at position 18596 in SEQ ID NO: 3, an adenine at position 18602 in SEQ ID NO: 3, a cytosine at position 21583 in SEQ ID NO: 3, a thymine at position 36594 in SEQ ID NO: 3, a thymine at position 37994 in SEQ ID NO: 3, an adenine at position 38293 in SEQ ID NO: 3, a cytosine at position 46972 in SEQ ID NO: 3, an adenine at position 48524 in SEQ ID NO: 3, a thymine at position 72488 in SEQ ID NO: 3 and a cytosine at position 38753 in SEQ ID NO: 4 are in particular associated with an increased risk of melanoma. An individual identified as having a predisposition to melanoma may be heteroygous or homozygous with respect to the allele associated with melanoma. A subject homozygous for an allele associated with an increased risk of melanoma (e.g., a thymine at position 7960 in SEQ ID NO: 1) is at a comparatively high risk of melanoma, a subject heterozygous for an allele associated with an increased risk of melanoma is at a comparatively intermediate risk of melanoma, and a subject homozygous for an allele associated with a decreased risk of melanoma (e.g., an adenine at position 7960 in a SEQ ID NO: 1, see Examples section below) is at a comparatively low risk of melanoma. A genotype may be assessed for a complementary strand, such that the complementary nucleotide at a particular position is detected (e.g., if a thymine or adenine is detected at position 7960 in SEQ ID NO: 1, the complementary strand would yield an adenine or thymine, respectively, where the adenine is associated with increased risk of melanoma).

[0122] Also featured are methods for determining risk of melanoma and/or identifying a subject at risk of melanoma by contacting a CDK10, FPGT, PCLO or REPS2 polypeptide or protein from a subject with an antibody that specifically binds to an epitope associated with increased risk of melanoma in the polypeptide.

Applications of Genomic Information to Pharmacogenomics

[0123] Pharmacogenomics is a discipline that involves tailoring a treatment for a subject according to the subject's genotype as a particular treatment regimen may exert a differential effect depending upon the subject's genotype. Based upon the outcome of a prognostic test described herein, a clinician or physician may target pertinent information and preventative or therapeutic treatments to a subject who would be benefited by the information or treatment and avoid directing such information and treatments to a subject who would not be benefited (e.g., the treatment has no therapeutic effect and/or the subject experiences adverse side effects).

[0124] For example, where a candidate therapeutic exhibits a significant interaction with a major allele and a comparatively weak interaction with a minor allele (e.g., an order of magnitude or greater difference in the interaction), such a therapeutic typically would not be administered to a subject genotyped as being homozygous for the minor allele, and sometimes not administered to a subject genotyped as being heterozygous for the minor allele. In another example, where a candidate therapeutic is not significantly toxic when administered to subjects who are homozygous for a major allele but is comparatively toxic when administered to subjects heterozygous or homozygous for a minor allele, the candidate therapeutic is not typically administered to subjects who are genotyped as being heterozygous or homozygous with respect to the minor allele.

[0125] The prognostic methods described herein are applicable to general pharmacogenomic approaches towards addressing melanoma. For example, a nucleic acid sample from an individual may be subjected to a prognostic test described herein. Where one or more polymorphic variations associated with increased risk of melanoma are identified in a subject, one or more melanoma treatments or prophylactic regimens may be prescribed to that subject. Subjects genotyped as having one or more of the alleles described herein that are associated with increased risk of melanoma often are prescribed a prophylactic regimen designed to minimize the occurance of melanoma. An example of a prophylactic regimen often prescribed is directed towards minimizing ultraviolet (UV) light exposure. Such a regimen may include, for example, prescription of a lotion applied to the skin that minimizes UV penetration and/or counseling individuals of other practices for reducing UV exposure, such as by wearing protective clothing and minimizing sun exposure.

[0126] In certain embodiments, a treatment regimen is specifically prescribed and/or administered to individuals who will most benefit from it based upon their risk of developing melanoma assessed by the prognostic methods described herein. Thus, provided are methods for identifying a subject predisposed to melanoma and then prescribing a therapeutic or preventative regimen to individuals identified as having a predisposition. Thus, certain embodiments are directed to a method for reducing melanoma in a subject, which comprises: detecting the presence or absence of a polymorphic variant associated with melanoma in a nucleotide sequence set forth in FIG. 1 in a nucleic acid sample from a subject, where the nucleotide sequence comprises a polynucleotide sequence selected from the group consisting of: (a) a nucleotide sequence set forth in SEQ ID NO: 1, 2, 3 or 4; (b) a nucleotide sequence which encodes a polypeptide consisting of an amino acid sequence encoded by a nucleotide sequence of SEQ ID NO: 1, 2, 3 or 4; (c) a nucleotide sequence which encodes a polypeptide that is 90% or more identical to an amino acid sequence encoded by a nucleotide sequence of SEQ ID NO: 1, 2, 3 or 4 or a nucleotide sequence about 90% or more identical to the nucleotide sequence in SEQ ID NO: 1, 2, 3 or 4; and (d) a fragment of a polynucleotide sequence of (a), (b), or (c); and prescribing or administering a treatment regimen to a subject from whom the sample originated where the presence of a polymorphic variation associated with melanoma is detected in the nucleotide sequence. In these methods, predisposition results may be utilized in combination with other test results to diagnose melanoma.

[0127] The treatment sometimes is preventative (e.g., is prescribed or administered to reduce the probability that a melanoma associated condition arises or progresses), sometimes is therapeutic, and sometimes delays, alleviates or halts the progression of a melanoma associated condition. Any known preventative or therapeutic treatment for alleviating or preventing the occurrence of a melanoma associated disorder is prescribed and/or administered. For example, the treatment sometimes is or includes a drug that reduces melanoma, including, for example, cisplatin, carmustine (BCNU), vinblastine, vincristine, and bleomycin, and/or a molecule that interacts with a nucleic acid or polypeptide described hereafter. In another example, the melanoma treatment is surgery. Surgery to remove (excise) a melanoma is the standard treatment for this disease. It is necessary to remove not only the tumor but also some normal tissue around it in order to minimize the chance that any cancer will be left in the area. It is common for lymph nodes near the tumor to be removed during surgery because cancer can spread through the lymphatic system. Surgery is generally not effective in controlling melanoma that is known to have spread to other parts of the body. In such cases, doctors may use other methods of treatment, such as chemotherapy, biological therapy, radiation therapy, or a combination of these methods.

[0128] As therapeutic approaches for melanoma continue to evolve and improve, the goal of treatments for melanoma related disorders is to intervene even before clinical signs (e.g., identification of irregular nevi based on A—asymmetry, B—border irregularity, C—color variation, D—diameter of >6 mm as described by Friedman R J, et al. in CA Cancer J Clin. 1985 May-June;35(3):130-51) first manifest. Thus, genetic markers associated with susceptibility to melanoma prove useful for early diagnosis, prevention and treatment of melanoma.

[0129] As melanoma preventative and treatment information can be specifically targeted to subjects in need thereof (e.g., those at risk of developing melanoma or those that have early signs of melanoma), provided herein is a method for preventing or reducing the risk of developing melanoma in a subject, which comprises: (a) detecting the presence or absence of a polymorphic variation associated with melanoma at a polymorphic site in a nucleotide sequence in a nucleic acid sample from a subject; (b) identifying a subject with a predisposition to melanoma, whereby the presence of the polymorphic variation is indicative of a predisposition to melanoma in the subject; and (c) if such a predisposition is identified, providing the subject with information about methods or products to prevent or reduce melanoma or to delay the onset of melanoma. Also provided is a method of targeting information or advertising to a subpopulation of a human population based on the subpopulation being genetically predisposed to a disease or condition, which comprises: (a) detecting the presence or absence of a polymorphic variation associated with melanoma at a polymorphic site in a nucleotide sequence in a nucleic acid sample from a subject; (b) identifying the subpopulation of subjects in which the polymorphic variation is associated with melanoma; and (c) providing information only to the subpopulation of subjects about a particular product which may be obtained and consumed or applied by the subject to help prevent or delay onset of the disease or condition.

[0130] Pharmacogenomics methods also may be used to analyze and predict a response to a melanoma treatment or a drug. For example, if pharmacogenomics analysis indicates a likelihood that an individual will respond positively to a melanoma treatment with a particular drug, the drug may be administered to the individual. Conversely, if the analysis indicates that an individual is likely to respond negatively to treatment with a particular drug, an alternative course of treatment may be prescribed. A negative response may be defined as either the absence of an efficacious response or the presence of toxic side effects. The response to a therapeutic treatment can be predicted in a background study in which subjects in any of the following populations are genotyped: a population that responds favorably to a treatment regimen, a population that does not respond significantly to a treatment regimen, and a population that responds adversely to a treatment regiment (e.g., exhibits one or more side effects). These populations are provided as examples and other populations and subpopulations may be analyzed. Based upon the results of these analyses, a subject is genotyped to predict whether he or she will respond favorably to a treatment regimen, not respond significantly to a treatment regimen, or respond adversely to a treatment regimen.

[0131] The prognostic tests described herein also are applicable to clinical drug trials. One or more polymorphic variants iridicative of response to an agent for treating melanoma or to side effects to an agent for treating melanoma may be identified using the methods described herein. Thereafter, potential participants in clinical trials of such an agent may be screened to identify those individuals most likely to respond favorably to the drug and exclude those likely to experience side effects. In that way, the effectiveness of drug treatment may be measured in individuals who respond positively to the drug, without lowering the measurement as a result of the inclusion of individuals who are unlikely to respond positively in the study and without risking undesirable safety problems.

[0132] Thus, another embodiment is a method of selecting an individual for inclusion in a clinical trial of a treatment or drug comprising the steps of: (a) obtaining a nucleic acid sample from an individual; (b) determining the identity of a polymorphic variation which is associated with a positive response to the treatment or the drug, or at least one polymorphic variation which is associated with a negative response to the treatment or the drug in the nucleic acid sample, and (c) including the individual in the clinical trial if the nucleic acid sample contains said polymorphic variation associated with a positive response to the treatment or the drug or if the nucleic acid sample lacks said polymorphic variation associated with a negative response to the treatment or the drug. In addition, the methods for selecting an individual for inclusion in a clinical trial of a treatment or drug encompass methods with any further limitation described in this disclosure, or those following, specified alone or in any combination. The polymorphic variation may be in a sequence selected individually or in any combination from the group consisting of (i) a polynucleotide sequence set forth in SEQ ID NO: 1, 2, 3 or 4; (ii) a polynucleotide sequence that is 90% or more identical to an amino acid sequence encoded by a nucleotide sequence of SEQ ID NO: 1, 2, 3 or 4; (iii) a polynucleotide sequence that encodes a polypeptide having an amino acid sequence identical to or 90% or more identical to an amino acid sequence encoded by a nucleotide sequence of SEQ ID NO: 1, 2, 3 or 4; and (iv) a fragment of a polynucleotide sequence of (i), (ii), or (iii) comprising the polymorphic site. The including step (c) optionally comprises administering the drug or the treatment to the individual if the nucleic acid sample contains the polymorphic variation associated with a positive response to the treatment or the drug and the nucleic acid sample lacks said biallelic marker associated with a negative response to the treatment or the drug.

[0133] Also provided herein is a method of partnering between a diagnostic/prognostic testing provider and a provider of a consumable product, which comprises: (a) the diagnostic/prognostic testing provider detects the presence or absence of a polymorphic variation associated with melanoma at a polymorphic site in a nucleotide sequence in a nucleic acid sample from a subject; (b) the diagnostic/prognostic testing provider identifies the subpopulation of subjects in which the polymorphic variation is associated with melanoma; (c) the diagnostic/prognostic testing provider forwards information to the subpopulation of subjects about a particular product which may be obtained and consumed or applied by the subject to help prevent or delay onset of the disease or condition; and (d) the provider of a consumable product forwards to the diagnostic test provider a fee every time the diagnostic/prognostic test provider forwards information to the subject as set forth in step (c) above.

Compositions Comprising a CDK10, FPGT PCLO or REPS2 Directed Molecule

[0134] Featured herein is a composition comprising a melanoma cell and one or more CDK10, FPGT, PCLO or REPS2 directed molecules. CDK10, FPGT, PCLO or REPS2 directed molecules include, but are not limited to, a compound that binds to a CDK10, FPGT, PCLO or REPS2 nucleic acid or polypeptide; an RNAi or siRNA molecule having a strand complementary to a CDK10, FPGT, PCLO or REPS2 DNA sequence; an antisense nucleic acid complementary to an RNA encoded by a CDK10, FPGT, PCLO or REPS2 DNA sequence; a ribozyme that hybridizes to a CDK10, FPGT, PCLO or REPS2 nucleotide sequence; an CDK10, FPGT, PCLO or REPS2 polypeptide, protein or fragment thereof, or a nucleic acid that encodes the foregoing; a nucleic acid aptamer that specifically binds a CDK10, FPGT, PCLO or REPS2 polypeptide, protein, nucleic acid or variant thereof; and an antibody or fragment thereof that specifically binds to a CDK10, FPGT, PCLO or REPS2 polypeptide, protein, nucleic acid or variant thereof. Compositions comprising an anitbody often include an adjuvant known in the art. The melanoma cell may be in a group of melanoma cells and/or other types of cells cultured in vitro or in a tissue having melanoma cells (e.g., a melanocytic lesion) maintained in vitro or present in an animal in vivo (e.g., a rat, mouse, ape or human). In certain embodiments, a composition comprises a component from a melanoma cell or from a subject having a melanoma cell instead of the melanoma cell or in addition to the melanoma cell, where the component sometimes is a nucleic acid molecule (e.g., genomic DNA), a protein mixture or isolated protein, for example. The aforementioned compositions have utility in diagnostic, prognostic and pharmacogenomic methods described previously and in melanoma therapeutics described hereafter. Certain CDK10, FPGT, PCLO or REPS2 directed molecules are described in greater detail below.

Compounds

[0135] Compounds can be obtained using any of the numerous approaches in combinatorial library methods known in the art, including: biological libraries; peptoid libraries (libraries of molecules having the functionalities of peptides, but with a novel, non-peptide backbone which are resistant to enzymatic degradation but which nevertheless remain bioactive (see, e.g., Zuckermann et al., J. Med. Chem.37: 2678-85 (1994)); spatially addressable parallel solid phase or solution phase libraries; synthetic library methods requiring deconvolution; “one-bead one-compound” library methods; and synthetic library methods using affinity chromatography selection. Biological library and peptoid library approaches are typically limited to peptide libraries, while the other approaches are applicable to peptide, non-peptide oligomer or small molecule libraries of compounds (Lam, Anticancer Drug Des. 12: 145, (1997)). Examples of methods for synthesizing molecular libraries are described, for example, in DeWitt et al., Proc. Natl. Acad. Sci. U.S.A. 90: 6909 (1993); Erb et al., Proc. Natl. Acad. Sci. USA 91: 11422 (1994); Zuckermann et al., J. Med. Chem. 37: 2678 (1994); Cho et al., Science 261: 1303 (1993); Carrell et al., Angew. Chem. Int. Ed. Engl. 33: 2059 (1994); Carell et al., Angew. Chem. Int. Ed. Engl. 33: 2061 (1994); and in Gallop et al, J. Med Chem. 37: 1233 (1994).

[0136] Libraries of compounds may be presented in solution (e.g., Houghten, Biotechniques 13: 412-421 (1992)), or on beads (Lam, Nature 354: 82-84 (1991)), chips (Fodor, Nature 364: 555-556 (1993)), bacteria or spores (Ladner, U.S. Pat. No. 5,223,409), plasmids (Cull et al., Proc. Natl. Acad. Sci. USA 89: 1865-1869 (1992)) or on phage (Scott and Smith, Science 249: 386-390 (1990); Devlin, Science 249: 404-406 (1990); Cwirla et al, Proc. Natl. Acad. Sci. 87: 6378-6382 (1990); Felici, J. Mol. Biol. 222: 301-310(1991); Ladner supra.).

[0137] A compound may alter expression or activity of CDK10, FPGT, PCLO or REPS2 polypeptides and may be a small molecule. Small molecules include, but are not limited to, peptides, peptidomimetics (e.g., peptoids), amino acids, amino acid analogs, polynucleotides, polynucleotide analogs, nucleotides, nucleotide analogs, organic or inorganic compounds (ie., including heteroorganic and organometallic compounds) having a molecular weight less than about 10,000 grams per mole, organic or inorganic compounds having a molecular weight less than about 5,000 grams per mole, organic or inorganic compounds having a molecular weight less than about 1,000 grams per mole, organic or inorganic compounds having a molecular weight less than about 500 grams per mole, and salts, esters, and other pharmaceutically acceptable forms of such compounds.

Antisense Nucleic Acid Molecules, Ribozymes, RNAi, siRNA and Modified CDK10, FPGT, PCLO or REPS2 Nucleic Acid Molecules

[0138] An “antisense” nucleic acid refers to a nucleotide sequence complementary to a “sense” nucleic acid encoding a polypeptide, e.g., complementary to the coding strand of a double-stranded cDNA molecule or complementary to an mRNA sequence. The antisense nucleic acid can be complementary to an entire CDK10, FPGT, PCLO or REPS2 coding strand, or to only a portion thereof (e.g., the coding region of human CDK10, FPGT, PCLO or REPS2 in SEQ ID NO: 1, 2, 3 or 4). In another embodiment, the antisense nucleic acid molecule is antisense to a “noncoding region” of the coding strand of a nucleotide sequence encoding CDK10, FPGT, PCLO or REPS2 (e.g., 5′ and 3′ untranslated regions).

[0139] An antisense nucleic acid can be designed such that it is complementary to the entire coding region of CDK10, FPGT, PCLO or REPS2 mRNA, and often the antisense nucleic acid is an oligonucleotide antisense to only a portion of a coding or noncoding region of CDK10, FPGT, PCLO or REPS2 mRNA. For example, the antisense oligonucleotide can be complementary to the region surrounding the translation start site of CDK10, FPGT, PCLO or REPS2 mRNA, e.g., between the −10 and +10 regions of the target gene nucleotide sequence of interest. An antisense oligonucleotide can be, for example, about 7, 10, 15, 20, 25, 30, 35, 40, 45, 50, 55, 60, 65, 70, 75, 80, or more nucleotides in length. The antisense nucleic acids, which include the ribozymes described hereafter, can be designed to target CDK10, FPGT, PCLO or REPS2 nucleic acid or CDK10, FPGT, PCLO or REPS2 nucleic acid variants. Among the variants, minor alleles and major alleles can be targeted, and those associated with a higher risk of melanoma are often designed, tested, and administered to subjects.

[0140] An antisense nucleic acid can be constructed using chemical synthesis and enzymatic ligation reactions using standard procedures. For example, an antisense nucleic acid (e.g., an antisense oligonucleotide) can be chemically synthesized using naturally occurring nucleotides or variously modified nucleotides designed to increase the biological stability of the molecules or to increase the physical stability of the duplex formed between the antisense and sense nucleic acids, e.g., phosphorothioate derivatives and acridine substituted nucleotides can be used. Antisense nucleic acid also can be produced biologically using an expression vector into which a nucleic acid has been subcloned in an antisense orientation (i.e., RNA transcribed from the inserted nucleic acid will be of an antisense orientation to a target nucleic acid of interest, described further in the following subsection).

[0141] When utilized as therapeutics, antisense nucleic acids typically are administered to a subject (e.g., by direct injection at a tissue site) or generated in situ such that they hybridize with or bind to cellular mRNA and/or genomic DNA encoding a CDK10, FPGT, PCLO or REPS2 polypeptide and thereby inhibit expression of the polypeptide, for example, by inhibiting transcription and/or translation. Alternatively, antisense nucleic acid molecules can be modified to target selected cells and then are administered systemically. For systemic administration, antisense molecules can be modified such that they specifically bind to receptors or antigens expressed on a selected cell surface, for example, by linking antisense nucleic acid molecules to peptides or antibodies which bind to cell surface receptors or antigens. Antisense nucleic acid molecules can also be delivered to cells using the vectors described herein. Sufficient intracellular concentrations of antisense molecules are achieved by incorporating a strong promoter, such as a pol II or pol III promoter, in the vector construct.

[0142] Antisense nucleic acid molecules sometimes are α-anomeric nucleic acid molecules. An α-anomeric nucleic acid molecule forms specific double-stranded hybrids with complementary RNA in which, contrary to the usual β-units, the strands run parallel to each other (Gaultier et al., Nucleic Acids. Res. 15: 6625-6641 (1987)). Antisense nucleic acid molecules can also comprise a 2′-o-methylribonucleotide (Inoue et al., Nucleic Acids Res. 15: 6131-6148 (1987)) or a chimeric RNA-DNA analogue (Inoue et al., FEBS Lett. 215: 327-330 (1987)). Antisense tnucleic acids sometimes are composed of DNA or PNA or any other nucleic acid derivatives described previously.

[0143] In another embodiment, an antisense nucleic acid is a ribozyme. A ribozyme having specificity for a CDK10, FPGT, PCLO or REPS2 encoding nucleic acid can include one or more sequences complementary to the nucleotide sequence of a CDK10, FPGT, PCLO or REPS2 DNA sequence disclosed herein (e.g., SEQ ID NO: 1, 2, 3 or 4), and a sequence having a known catalytic region responsible for mRNA cleavage (see e.g., U.S. Pat. No. 5,093,246 or Haselhoff and Gerlach, Nature 334: 585-591 (1988)). For example, a derivative of a Tetrahymena L-19 IVS RNA is sometimes utilized in which the nucleotide sequence of the active site is complementary to the nucleotide sequence to be cleaved in a CDK10, FPGT, PCLO or REPS2 encoding mRNA (see e.g., Cech et al. U.S. Pat. No. 4,987,071; and Cech et al. U.S. Pat. No. 5,116,742). Also, CDK10, FPGT, PCLO or REPS2 mRNA can be used to select a catalytic RNA having a specific ribonuclease activity from a pool of RNA molecules (see e.g., Bartel & Szostak, Science 261: 1411-1418 (1993)).

[0144] CDK10, FPGT, PCLO or REPS2 directed molecules include in certain embodiments nucleic acids that can form triple helix structures with a CDK10, FPGT, PCLO or REPS2 nucleotide sequence, especially one that includes a regulatory region that controls CDK10, FPGT, PCLO or REPS2 expression. CDK10, FPGT, PCLO or REPS2 gene expression can be inhibited by targeting nucleotide sequences complementary to the regulatory region of the CDK10, FPGT, PCLO or REPS2 (e.g., CDK10, FPGT, PCLO or REPS2 promoter and/or enhancers) to form triple helical structures that prevent transcription of the CDK10, FPGT, PCLO or REPS2 gene in target cells (see e.g., Helene, Anticancer Drug Des. 6(6): 569-84 (1991); Helene et al., Ann. N.Y. Acad. Sci. 660: 27-36 (1992); and Maher, Bioassays 14(12): 807-15 (1992). Potential sequences that can be targeted for triple helix formation can be increased by creating a so-called “switchback” nucleic acid molecule. Switchback molecules are synthesized in an alternating 5′-3′, 3′-5′ manner, such that they base pair with first one strand of a duplex and then the other, eliminating the necessity for a sizeable stretch of either purines or pyrimidines to be present on one strand of a duplex.

[0145] CDK10, FPGT, PCLO or REPS2 directed molecules include RNAi and siRNA nucleic acids. Gene expression may be inhibited by the introduction of double-stranded RNA (dsRNA), which induces potent and specific gene silencing, a phenomenon called RNA interference or RNAi. See, e.g., Fire et al., U.S. Pat. No. 6,506,559; Tuschl et al. PCT International Publication No. WO 01/75164; Kay et al. PCT International Publication No. WO 03/010180A1; or Bosher J M, Labouesse, Nat Cell Biol 2000 February;2(2):E31-6. This process has been improved by decreasing the size of the double-stranded RNA to 20-24 base pairs (to create small-interfering RNAs or siRNAs) that “switched off” genes in mammalian cells without initiating an acute phase response, i.e., a host defense mechanism that often results in cell death (see, e.g., Caplen et al. Proc Natl Acad Sci U S A. 2001 Aug 14;98(17):9742-7 and Elbashir et al. Methods 2002 Feb;26(2):199-213). There is increasing evidence of post-transcriptional gene silencing by RNA interference (RNAi) for inhibiting targeted expression in mammalian cells at the mRNA level, in human cells. There is additional evidence of effective methods for inhibiting the proliferation and migration of tumor cells in human patients, and for inhibiting metastatic cancer development (see, e.g., U.S. patent application No. US2001000993183; Caplen et al. Proc Natl Acad Sci U S A; and Abderrahmani et al. Mol Cell Biol 2001 Nov. 21(21):7256-67).

[0146] An “siRNA” or “RNAi” refers to a nucleic acid that forms a double stranded RNA and has the ability to reduce or inhibit expression of a gene or target gene when the siRNA is delivered to or expressed in the same cell as the gene or target gene. “siRNA” refers to short double-stranded RNA formed by the complementary strands. Complementary portions of the siRNA that hybridize to form the double stranded molecule often have substantial or complete identity to the target molecule sequence. In one embodiment, an siRNA refers to a nucleic acid that has substantial or complete identity to a target gene and forms a double stranded siRNA, such as a nucleotide sequence set forth in SEQ ID NO: 1, 2, 3 or 4, for example.

[0147] When designing the siRNA molecules, the targeted region often is selected from a given DNA sequence beginning 50 to 100 nucleotides downstream of the start codon. See, e.g., Elbashir et al,. Methods 26:199-213 (2002). Initially, 5′ or 3′ UTRs and regions nearby the start codon were avoided assuming that UTR-binding proteins and/or translation initiation complexes may interfere with binding of the siRNP or RISC endonuclease complex. Sometimes regions of the target 23 nucleotides in length conforming to the sequence motif AA(N19)TT (N, an nucleotide), and regions with approximately 30% to 70% G/C-content (often about 50% G/C-content) often are selected. If no suitable sequences are found, the search often is extended using the motif NA(N21). The sequence of the sense siRNA sometimes corresponds to (N19) Tr or N21 (position 3 to 23 of the 23-nt motif), respectively. In the latter case, the 3′ end of the sense siRNA often is converted to TT. The rationale for this sequence conversion is to generate a symmetric duplex with respect to the sequence composition of the sense and antisense 3′ overhangs. The antisense siRNA is synthesized as the complement to position 1 to 21 of the 23-nt motif. Because position 1 of the 23-nt motif is not recognized sequence-specifically by the antisense siRNA, the 3′-most nucleotide residue of the antisense siRNA can be chosen deliberately. However, the penultimate nucleotide of the antisense siRNA (complementary to position 2 of the 23-nt motif) often is complementary to the targeted sequence. For simplifying chemical synthesis, TT often is utilized. siRNAs corresponding to the target motif NAR(N17)YNN, where R is purine (A,G) and Y is pyrimidine (C,U), often are selected. Respective 21 nucleotide sense and antisense siRNAs often begin with a purine nucleotide and can also be expressed from pol III expression vectors without a change in targeting site. Expression of RNAs from pol III promoters often is efficient when the first transcribed nucleotide is a purine.

[0148] The sequence of the siRNA can correspond to the full length target gene, or a subsequence thereof. Often, the siRNA is about 15 to about 50 nucleotides in length (e.g., each complementary sequence of the double stranded siRNA is 15-50 nucleotides in length, and the double stranded siRNA is about 15-50 base pairs in length, somtimes about 20-30 nucleotides in length or about 20-25 nucleotides in length, e.g., 20, 21, 22, 23, 24, 25, 26, 27, 28, 29, or 30 nucleotides in length. The siRNA sometimes is about 21 nucleotides in length. Methods of using siRNA are well known in the art, and specific siRNA molecules may be purchased from a number of companies including Dharmacon Research, Inc.

[0149] Antisense, ribozyme, RNAi and siRNA nucleic acids can be altered to form modified CDK10, FPGT, PCLO or REPS2 nucleic acid molecules. The nucleic acids can be altered at base moieties, sugar moieties or phosphate backbone moieties to improve stability, hybridization, or solubility of the molecule. For example, the deoxyribose phosphate backbone of nucleic acid molecules can be modified to generate peptide nucleic acids (see Hyrup et al., Bioorganic & Medicinal Chemistry 4 (1): 5-23 (1996)). As used herein, the terms “peptide nucleic acid” or “PNA” refers to a nucleic acid mimic such as a DNA mimic, in which the deoxyribose phosphate backbone is replaced by a pseudopeptide backbone and only the four natural nucleobases are retained. The neutral backbone of a PNA can allow for specific hybridization to DNA and RNA under conditions of low ionic strength. Synthesis of PNA oligomers can be performed using standard solid phase peptide synthesis protocols as described, for example, in Hyrup et al., (1996) supra and Perry-O'Keefe et al., Proc. Natl. Acad. Sci. 93: 14670-675 (1996).

[0150] PNAs of CDK10, FPGT, PCLO or REPS2 nucleic acids can be used in prognostic, diagnostic, and therapeutic applications. For example, PNAs can be used as antisense or antigene agents for sequence-specific modulation of gene expression by, for example, inducing transcription or translation arrest or inhibiting replication. PNAs of CDK10, FPGT, PCLO or REPS2 nucleic acid molecules can also be used in the analysis of single base pair mutations in a gene, (e.g., by PNA-directed PCR clamping); as “artificial restriction enzymes” when used in combination with other enzymes, (e.g., S1 nucleases (Hyrup (1996) supra)); or as probes or primers for DNA sequencing or hybridization (Hyrup et al., (1996) supra; Perry-O'Keefe supra).

[0151] In other embodiments, oligonucleotides may include other appended groups such as peptides (e.g., for targeting host cell receptors in vivo), or agents facilitating transport across cell membranes (see e.g., Letsinger et al., Proc. Natl. Acad. Sci. USA 86: 6553-6556 (1989); Lemaitre et al, Proc. Natl. Acad. Sci. USA 84: 648-652 (1987); PCT Publication No. W088/09810) or the blood-brain barrier (see, e.g., PCT Publication No. W089/10134). In addition, oligonucleotides can be modified with hybridization-triggered cleavage agents (See, e.g., Krol et al, Bio-Techniques 6: 958-976 (1988)) or intercalating agents. (See, e.g., Zon, Pharm. Res. 5: 539-549 (1988) ). To this end, the oligonucleotide may be conjugated to another molecule, (e.g., a peptide, hybridization triggered cross-linking agent, transport agent, or hybridization-triggered cleavage agent).

[0152] Also included herein are molecular beacon oligonucleotide primer and probe molecules having one or more regions complementary to a CDK10, FPGT, PCLO or REPS2 nucleic acid, two complementary regions one having a fluorophore and one a quencher such that the molecular beacon is useful for quantifying the presence of the CDK10, FPGT, PCLO or REPS2 nucleic acid in a sample. Molecular beacon nucleic acids are described, for example, in Lizardi et al., U.S. Pat. No. 5,854,033; Nazarenko et al., U.S. Pat. No. 5,866,336, and Livak et al, U.S. Pat. No. 5,876,930.

Anti-CDK10, FPGT, PCLO or REPS2 Antibodies

[0153] The term “antibody” as used herein refers to an immunoglobulin molecule or immunologically active portion thereof, i.e., an antigen-binding portion. Examples of immunologically active portions of immunoglobulin molecules include F(ab) and F(ab′)₂ fragments which can be generated by treating the antibody with an enzyme such as pepsin. An antibody sometimes is a polyclonal, monoclonal, recombinant (e.g., a chimeric or humanized), fully human, non-human (e.g., murine), or a single chain antibody. An antibody may have effector function and can fix complement, and is sometimes coupled to a toxin or imaging agent.

[0154] A full-length CDK10, FPGT, PCLO or REPS2 polypeptide or antigenic peptide fragment can be used as an immunogen or can be used to identify anti-CDK10, FPGT, PCLO or REPS2 antibodies made with other immunogens, e.g., cells, membrane preparations, and the like. An antigenic peptide of CDK10, FPGT, PCLO or REPS2 often includes at least 8 amino acid residues of the amino acid sequences set forth in FIGS. 5A-5B, 6A-6B or 7A-7B and encompasses an epitope of CDK10, FPGT, PCLO or REPS2. Antigenic peptides sometimes include 10 or more amino acids, 15 or more amino acids, 20 or more amino acids, or 30 or more amino acids. Hydrophilic and hydrophobic fragments of CDK10, FPGT, PCLO or REPS2 polypeptides sometimes are used as immunogens.

[0155] Epitopes encompassed by the antigenic peptide are regions of CDK10, FPGT, PCLO or REPS2 located on the surface of the polypeptide (e.g., hydrophilic regions) as well as regions with high antigenicity. For example, an Emini surface probability analysis of the human CDK10, FPGT, PCLO or REPS2 polypeptide sequence can be used to indicate the regions that have a particularly high probability of being localized to the surface of the CDK10, FPGT, PCLO or REPS2 polypeptide and are thus likely to constitute surface residues useful for targeting antibody production. The antibody may bind an epitope on any domain or region on CDK10, FPGT, PCLO or REPS2 polypeptides described herein.

[0156] Also, chimeric, humanized, and completely human antibodies are useful for applications which include repeated administration to subjects. Chimeric and humanized monoclonal antibodies, comprising both human and non-human portions, can be made using standard recombinant DNA techniques. Such chimeric and humanized monoclonal antibodies can be produced by recombinant DNA techniques known in the art, for example using methods described in Robinson et al International Application No. PCT/US86/02269; Akira, et al European Patent Application 184,187; Taniguchi, M., European Patent Application 171,496; Morrison et al European Patent Application 173,494; Neuberger et al PCT International Publication No. WO 86/01533; Cabilly et al U.S. Pat. No. 4,816,567; Cabilly et al European Patent Application 125,023; Better et al., Science 240: 1041-1043 (1988); Liu et al., Proc. Natl. Acad. Sci. USA 84: 3439-3443 (1987); Liu et al., J. Immunol 139: 3521-3526 (1987); Sun et al., Proc. Natl. Acad. Sci. USA 84: 214-218 (1987); Nishimura et al., Canc. Res. 47: 999-1005 (1987); Wood et al., Nature 314: 446-449 (1985); and Shaw et al., J. Natl. Cancer Inst. 80: 1553-1559 (1988); Morrison, S. L., Science 229: 1202-1207 (1985); Oi et al., BioTechniques 4: 214 (1986); Winter U.S. Pat. No. 5,225,539; Jones et al., Nature 321: 552-525 (1986); Verhoeyan et al., Science 239: 1534; and Beidler et al., J. Immunol. 141: 4053-4060 (1988).

[0157] Completely human antibodies are particularly desirable for therapeutic treatment of human patients. Such antibodies can be produced using transgenic mice that are incapable of expressing endogenous immunoglobulin heavy and light chains genes, but which can express human heavy and light chain genes. See, for example, Lonberg and Huszar, Int. Rev. Immunol. 13: 65-93 (1995); and U.S. Pat. Nos. 5,625,126; 5,633,425; 5,569,825; 5,661,016; and 5,545,806. In addition, companies such as Abgenix, Inc. (Fremont, Calif.) and Medarex, Inc. (Princeton, N.J.), can be engaged to provide human antibodies directed against a selected antigen using technology similar to that described above. Completely human antibodies that recognize a selected epitope also can be generated using a technique referred to as “guided selection.” In this approach a selected non-human monoclonal antibody (e.g., a murine antibody) is used to guide the selection of a completely human antibody recognizing the same epitope. This technology is described for example by Jespers et al., Bio/Technology 12: 899-903 (1994).

[0158] An anti-CDK10, FPGT, PCLO or REPS2 antibody can be a single chain antibody. A single chain antibody (scFV) can be engineered (see, e.g., Colcher et al, Ann. N Y Acad. Sci. 880: 263-80 (1999); and Reiter, Clin. Cancer Res. 2: 245-52 (1996)). Single chain antibodies can be dimerized or multimerized to generate multivalent antibodies having specificities for different epitopes of the same target CDK10, FPGT, PCLO or REPS2 polypeptide.

[0159] Antibodies also may be selected or modified so that they exhibit reduced or no ability to bind an Fc receptor. For example, an antibody may be an isotype or subtype, fragment or other mutant, which does not support binding to an Fc receptor (e.g., it has a mutagenized or deleted Fc receptor binding region).

[0160] Also, an antibody (or fragment thereof) may be conjugated to a therapeutic moiety such as a cytotoxin, a therapeutic agent or a radioactive metal ion. A cytotoxin or cytotoxic agent includes any agent that is detrimental to cells. Examples include taxol, cytochalasin B, gramicidin D, ethidium bromide, emetine, mitomycin, etoposide, tenoposide, vincristine, vinblastine, colchicin, doxorubicin, daunorubicin, dihydroxy anthracin dione, mitoxantrone, mithramycin, actinomycin D, 1-dehydrotestosterone, glucocorticoids, procaine, tetracaine, lidocaine, propranolol, and puromycin and analogs or homologs thereof. Therapeutic agents include, but are not limited to, antimetabolites (e.g., methotrexate, 6-mercaptopurine, 6-thioguanine, cytarabine, 5-fluorouracil decarbazine), alkylating agents (e.g., mechlorethamine, thiotepa chlorambucil, melphalan, carmustine (BCNU) and lomustine (CCNU), cyclophosphamide, busulfan, dibromomannitol, streptozotocin, mitomycin C, and cis-dichlorodiamine platinum (II) (DDP) cisplatin), anthracyclines (e.g., daunorubicin (formerly daunomycin) and doxorubicin), antibiotics (e.g., dactinomycin (formerly actinomycin), bleomycin, mithramycin, and anthramycin (AMC)), and anti-mitotic agents (e.g., vincristine and vinblastine).

[0161] Antibody conjugates can be used for modifying a given biological response. For example, the drug moiety may be a protein or polypeptide possessing a desired biological activity. Such proteins may include, for example, a toxin such as abrin, ricin A, pseudomonas exotoxin, or diphtheria toxin; a polypeptide such as tumor necrosis factor, γ-interferon, α-interferon, nerve growth factor, platelet derived growth factor, tissue plasminogen activator; or, biological response modifiers such as, for example, lymphokines, interleukin-1 (“IL-1”), interleukin-2 (“IL-2”), interleukin-6 (“IL-6”), granulocyte macrophage colony stimulating factor (“GM-CSF”), granulocyte colony stimulating factor (“G-CSF”), or other growth factors. Also, an antibody can be conjugated to a second antibody to form an antibody heteroconjugate as described by Segal in U.S. Pat. No. 4,676,980, for example.

[0162] An anti-CDK10, FPGT, PCLO or REPS2 antibody (e.g., monoclonal antibody) can be used to isolate CDK10, FPGT, PCLO or REPS2 polypeptides by standard techniques, such as affinity chromatography or immunoprecipitation. Moreover, an anti-CDK10, FPGT, PCLO or REPS2 antibody can be used to detect a CDK10, FPGT, PCLO or REPS2 polypeptide (e.g., in a cellular lysate or cell supernatant) in order to evaluate the abundance and pattern of expression of the polypeptide. Anti-CDK10, FPGT, PCLO or REPS2 antibodies can be used diagnostically to monitor polypeptide levels in tissue as part of a clinical testing procedure, e.g., to determine the efficacy of a given treatment regimen. Detection can be facilitated by coupling (i.e., physically linking) the antibody to a detectable substance (i.e., antibody labeling). Examples of detectable substances include various enzymes, prosthetic groups, fluorescent materials, luminescent materials, bioluminescent materials, and radioactive materials. Examples of suitable enzymes include horseradish peroxidase, alkaline phosphatase, β-galactosidase, or acetylcholinesterase; examples of suitable prosthetic group complexes include streptavidin/biotin and avidinibiotin; examples of suitable fluorescent materials include umbelliferone, fluorescein, fluorescein isothiocyanate, rhodamine, dichlorotriazinylamine fluorescein, dansyl chloride or phycoerythrin; an example of a luminescent material includes luminol; examples of bioluminescent materials include luciferase, luciferin, and aequorin, and examples of suitable radioactive material include ¹²⁵I, ¹³¹I, ³⁵S or ³H. Also, an anti-CDK10, FPGT, PCLO or REPS2 antibody can be utilized as a test molecule for determining whether it can treat melanoma, and as a therapeutic for administration to a subject for treating melanoma.

[0163] An antibody can be made by immunizing with a purified CDK10, FPGT, PCLO or REPS2 antigen, or a fragment thereof, e.g., a fragment described herein, a membrane associated antigen, tissues, e.g., crude tissue preparations, whole cells, preferably living cells, lysed cells, or cell fractions.

[0164] Included herein are antibodies which bind only a native CDK10, FPGT, PCLO or REPS2 polypeptide, only denatured or otherwise non-native CDK10, FPGT, PCLO or REPS2 polypeptide, or which bind both, as well as those having linear or conformational epitopes. Conformational epitopes sometimes can be identified by selecting antibodies that bind to native but not denatured CDK10, FPGT, PCLO or REPS2 polypeptide. Also featured are antibodies that specifically bind to a CDK10, FPGT, PCLO or REPS2 protein or polypeptide variant associated with melanoma.

Screening Assays

[0165] Featured herein are methods for identifying a candidate therapeutic for treating melanoma and detecting occurance of melanoma. The methods comprise contacting a test molecule with a CDK10, FPGT, PCLO or REPS2 nucleic acid, substantially identical nucleic acid, polypeptide, substantially identical polypeptide, or fragment of the foregoing in a system. The nucleic acid often is a CDK10, FPGT, PCLO or REPS2 nucleotide sequence represented by SEQ ID NO: 1, 2, 3 or 4, respectively; sometimes is a nucleotide sequence substantially identical to the nucleotide sequence of SEQ ID NO: 1, 2, 3 or 4 or sometimes a fragment thereof; and the CDK10, FPGT PCLO or REPS2 polypeptide or fragment thereof is a polypeptide encoded by any of these nucleic acids. The method also comprises determining the presence or absence of an interaction between the test molecule and the CDK10, FPGT, PCLO or REPS2 nucleic acid or polypeptide, where the presence of an interaction between the test molecule and the CDK10, FPGT, PCLO or REPS2 nucleic acid or polypeptide identifies the test molecule as a candidate melanoma therapeutic.

[0166] As used herein, the term “test molecule” and “candidate therapeutic” refers to modulators of regulation of transcription and translation of CDK10, FPGT, PCLO or REPS2 nucleic acids and modulations of expression and activity of CDK10, FPGT, PCLO or REPS2 polypeptides. The term −modulator” as used herein refers to a molecule which agonizes or antagonizes CDK10, FPGT, PCLO or REPS2 DNA replication and/or DNA processing (e.g., methylation), CDK10, FPGT, PCLO or REPS2 RNA transcription and/or RNA processing(e.g., removal of intronic sequences and/or translocation from the nucleus), CDK10, FPGT, PCLO or REPS2 polypeptide production (e.g., translation of the polypeptide from mRNA, and/or post-translational modification such as glycosylation, phosphorylation, and proteolysis of pro-polypeptides), and/or CDK10, FPGT, PCLO or REPS2 function (e.g., conformational changes, binding of nucleotides or nucleotide analogs, interaction with binding partners, effect on phosphorylation, and/or effect on occurrence of melanoma). Test molecules and candidate therapeutics include, but are not limited to, compounds, RNAi or siRNA molecules, antisense nucleic acids, ribozymes, CDK10, FPGT, PCLO or REPS2 polypeptides or fragments thereof, and immunotherapeutics (e.g., antibodies and HLA-presented polypeptide fragrnents).

[0167] As used herein, the term “system” refers to a cell free in vitro environment and a cell-based environment such as a collection of cells, a tissue, an organ, or an organism. A system is “contacted” with a test molecule in a variety of manners, including adding molecules in solution and allowing them to interact with one another by diffusion, cell injection, and any administration routes in an animal. As used herein, the term “interaction” refers to an effect of a test molecule on a CDK10, FPGT, PCLO or REPS2 nucleic acid, polypeptide, or variant thereof (collectively referred to as a “CDK10, FPGT, PCLO or REPS2 molecule”), where the effect is sometimes binding between the test molecule and the nucleic acid or polypeptide, and is often an observable change in cells, tissue, or organism.

[0168] There are many standard methods for detecting the presence or absence of interaction between a test molecule and a CDK10, FPGT, PCLO or REPS2 nucleic acid or polypeptide. For example, titrametric, acidimetric, radiometric, NMR, monolayer, polarographic, spectrophotometric, fluorescent, and ESR assays probative of CDK10, FPGT, PCLO or REPS2 function may be utilized.

[0169] CDK10, FPGT, PCLO or REPS2 activity and/or CDK10, FPGT, PCLO or REPS2 interactions can be detected and quantified using assays known in the art and described in Examples hereafter.

[0170] An interaction can be determined by labeling the test molecule and/or the CDK10, FPGT, PCLO or REPS2 molecule, where the label is covalently or non-covalently attached to the test molecule or CDK10, FPGT, PCLO or REPS2 molecule. The label is sometimes a radioactive molecule such as ¹²⁵I, ¹³¹I, ³⁵S or ³H, which can be detected by direct counting of radioemission or by scintillation counting. Also, enzymatic labels such as horseradish peroxidase, alkaline phosphatase, or luciferase may be utilized where the enzymatic label can be detected by determining conversion of an appropriate substrate to product. Also, presence or absence of an interaction can be determined without labeling. For example, a microphysiometer (e.g., Cytosensor) is an analytical instrument that measures the rate at which a cell acidifies its environment using a light-addressable potentiometric sensor (LAPS). Changes in this acidification rate can be used as an indication of an interaction between a test molecule and CDK10, FPGT, PCLO or REPS2 (McConnell, H. M. et al., Science 257: 1906-1912 (1992)).

[0171] In cell-based systems, cells typically include a CDK10, FPGT, PCLO or REPS2 nucleic acid or polypeptide or variants thereof and are often of mammalian origin, although the cell can be of any origin. Whole cells, cell homogenates, and cell fractions (e.g., cell membrane fractions) can be subjected to analysis. Where interactions between a test molecule with a CDK10, FPGT, PCLO or REPS2 polypeptide or variant thereof are monitored, soluble and/or membrane bound forms of the polypeptide or variant may be utilized. Where membrane-bound forms of the polypeptide are used, it may be desirable to utilize a solubilizing agent. Examples of such solubilizing agents include non-ionic detergents such as n-octylglucoside, n-dodecylglucoside, n-dodecylmaltoside, octanoyl-N-methylglucamide, decanoyl-N-methylglucamide, Triton® X-100, Triton® X-114, Thesit®, Isotridecypoly(ethylene glycol ether)ₙ, 3-[(3-cholamidopropyl)dimethylamminio]-1-propane sulfonate (CHAPS), 3-[(3-cholamidopropyl)dimethylamminio]-2-hydroxy-1-propane sulfonate (CHAPSO), or N-dodecyl-N,N-dimethyl-3-ammonio-1-propane sulfonate.

[0172] An interaction between two molecules can also be detected by monitoring fluorescence energy transfer (FET) (see, for example, Lakowicz et al., U.S. Pat. No. 5,631,169; Stavrianopoulos et al. U.S. Pat. No. 4,868,103). A fluorophore label on a first, “donor” molecule is selected such that its emitted fluorescent energy will be absorbed by a fluorescent label on a second, “acceptor” molecule, which in turn is able to fluoresce due to the absorbed energy. Alternately, the “donor” polypeptide molecule may simply utilize the natural fluorescent energy of tryptophan residues. Labels are chosen that emit different wavelengths of light, such that the “acceptor” molecule label may be differentiated from that of the “donor”. Since the efficiency of energy transfer between the labels is related to the distance separating the molecules, the spatial relationship between the molecules can be assessed. In a situation in which binding occurs between the molecules, the fluorescent emission of the “acceptor” molecule label in the assay should be maximal. An FET binding event can be conveniently measured through standard fluorometric detection means well known in the art (e.g., using a fluorimeter).

[0173] In another embodiment, determining the presence or absence of an interaction between a test molecule and a CDK10, FPGT, PCLO or REPS2 molecule can be effected by using real-time Biomolecular Interaction Analysis (BIA) (see, e.g., Sjolander & Urbaniczk, Anal. Chem. 63: 2338-2345 (1991) and Szabo et al., Curr. Opin. Struct. Biol. 5: 699-705 (1995)). “Surface plasmon resonance” or “BIA” detects biospecific interactions in real time, without labeling any of the interactants (e.g., BIAcore). Changes in the mass at the binding surface (indicative of a binding event) result in alterations of the refractive index of light near the surface (the optical phenomenon of surface plasmon resonance (SPR)), resulting in a detectable signal which can be used as an indication of real-time reactions between biological molecules.

[0174] In another embodiment, the CDK10, FPGT, PCLO or REPS2 molecule or test molecules are anchored to a solid phase. The CDK10, FPGT, PCLO or REPS2 molecule/test molecule complexes anchored to the solid phase can be detected at the end of the reaction. The target CDK10, FPGT, PCLO or REPS2 molecule is often anchored to a solid surface, and the test molecule, which is not anchored, can be labeled, either directly or indirectly, with detectable labels discussed herein.

[0175] It may be desirable to immobilize a CDK10, FPGT, PCLO or REPS2 molecule, an anti-CDK10, FPGT, PCLO or REPS2 antibody, or test molecules to facilitate separation of complexed from uncomplexed forms of CDK10, FPGT, PCLO or REPS2 molecules and test molecules, as well as to accommodate automation of the assay. Binding of a test molecule to a CDK10, FPGT, PCLO or REPS2 molecule can be accomplished in any vessel suitable for containing the reactants. Examples of such vessels include microtitre plates, test tubes, and micro-centrifuge tubes. In one embodiment, a fusion polypeptide can be provided which adds a domain that allows a CDK10, FPGT, PCLO or REPS2 molecule to be bound to a matrix. For example, glutathione-S-transferase/CDK10, FPGT, PCLO or REPS2 fusion polypeptides or glutathione-S-transferase/target fusion polypeptides can be adsorbed onto glutathione sepharose beads (Sigma Chemical, St. Louis, Mo.) or glutathione derivatized microtitre plates, which are then combined with the test compound or the test compound and either the non-adsorbed target polypeptide or CDK10, FPGT, PCLO or REPS2 polypeptide, and the mixture incubated under conditions conducive to complex formation (e.g., at physiological conditions for salt and pH). Following incubation, the beads or microtitre plate wells are washed to remove any unbound components, the matrix immobilized in the case of beads, complex determined either directly or indirectly, for example, as described above. Alternatively, the complexes can be dissociated from the matrix, and the level of CDK10, FPGT, PCLO or REPS2 binding or activity determined using standard techniques.

[0176] Other techniques for immobilizing a CDK10, FPGT, PCLO or REPS2 molecule on matrices include using biotin and streptavidin. For example, biotinylated CDK10, FPGT, PCLO or REPS2 polypeptide or target molecules can be prepared from biotin-NHS (N-hydroxy-succinimide) using techniques known in the art (e.g., biotinylation kit, Pierce Chemicals, Rockford, Ill.), and immobilized in the wells of streptavidin-coated 96 well plates (Pierce Chemical).

[0177] In order to conduct the assay, the non-immobilized component is added to the coated surface containing the anchored component. After the reaction is complete, unreacted components are removed (e.g., by washing) under conditions such that any complexes formed will remain immobilized on the solid surface. The detection of complexes anchored on the solid surface can be accomplished in a number of ways. Where the previously non-immobilized component is pre-labeled, the detection of label immobilized on the surface indicates that complexes were formed. Where the previously non-immobilized component is not pre-labeled, an indirect label can be used to detect complexes anchored on the surface; e.g., using a labeled antibody specific for the immobilized component (the antibody, in turn, can be directly labeled or indirectly labeled with, e.g., a labeled anti-Ig antibody).

[0178] In one embodiment, this assay is performed utilizing antibodies reactive with CDK10, FPGT, PCLO or REPS2 polypeptide or test molecules but which do not interfere with binding of the CDK10, FPGT, PCLO or REPS2 polypeptide to its test molecule. Such antibodies can be derivatized to the wells of the plate, and unbound target or CDK10, FPGT, PCLO or REPS2 polypeptide trapped in the wells by antibody conjugation. Methods for detecting such complexes, in addition to those described above for the GST-immobilized complexes, include immunodetection of complexes using antibodies reactive with the CDK10, FPGT, PCLO or REPS2 polypeptide or target molecule, as well as enzyme-linked assays which rely on detecting an enzymatic activity associated with the CDK10, FPGT, PCLO or REPS2 polypeptide or test molecule.

[0179] Alternatively, cell free assays can be conducted in a liquid phase. In such an assay, the reaction products are separated from unreacted components, by any of a number of standard techniques, including but not limited to: differential centrifugation (see, for example, Rivas, G., and Minton, A. P., Trends Biochem Sci Aug; 18(8): 284-7 (1993)); chromatography (gel filtration chromatography, ion-exchange chromatography); electrophoresis (see, e.g., Ausubel et al., eds. Current Protocols in Molecular Biology, J. Wiley: New York (1999)); and immunoprecipitation (see, for example, Ausubel, F. et al., eds. Current Protocols in Molecular Biology, J. Wiley: New York (1999)). Such resins and chromatographic techniques are known to one skilled in the art (see, e.g., Heegaard, J Mol. Recognit. Winter; 11(1-6): 141-8 (1998); Hage & Tweed, J. Chromatogr. B Biomed. Sci. Appl October 10; 699 (1-2): 499-525 (1997)). Further, fluorescence energy transfer may also be conveniently utilized, as described herein, to detect binding without further purification of the complex from solution.

[0180] In another embodiment, modulators of CDK10, FPGT, PCLO or REPS2 expression are identified. For example, a cell or cell free mixture is contacted with a candidate compound and the expression of CDK10, FPGT, PCLO or REPS2 mRNA or polypeptide evaluated relative to the level of expression of CDK10, FPGT, PCLO or REPS2 mRNA or polypeptide in the absence of the candidate compound. When expression of CDK10, FPGT, PCLO or REPS2 mRNA or polypeptide is greater in the presence of the candidate compound than in its absence, the candidate compound is identified as a stimulator of CDK10, FPGT, PCLO or REPS2 mRNA or polypeptide expression. Alternatively, when expression of CDK10, FPGT, PCLO or REPS2 mRNA or polypeptide is less (statistically significantly less) in the presence of the candidate compound than in its absence, the candidate compound is identified as an inhibitor of CDK10, FPGT, PCLO or REPS2 mRNA or polypeptide expression. The level of CDK10, FPGT, PCLO or REPS2 mRNA or polypeptide expression can be determined by methods described herein for detecting CDK10, FPGT, PCLO or REPS2 mRNA or polypeptide.

[0181] In an embodiment, binding partners that interact with a CDK10, FPGT, PCLO or REPS2 molecule are detected. The CDK10, FPGT, PCLO or REPS2 molecules can interact with one or more cellular or extracellular macromolecules, such as polypeptides, in vivo, and these molecules that interact with CDK10, FPGT, PCLO or REPS2 molecules are referred to herein as “binding partners.” Molecules that disrupt such interactions can be useful in regulating the activity of the target gene product. Such molecules can include, but are not limited to molecules such as antibodies, peptides, and small molecules (e.g., siRNA). The preferred target genes/products for use in this embodiment are the CDK10, FPGT, PCLO or REPS2 genes herein identified. In an alternative embodiment, provided are methods for determining the ability of the test compound to modulate the activity of a CDK10, FPGT, PCLO or REPS2 polypeptide through modulation of the activity of a downstream effector of a CDK10, FPGT, PCLO or REPS2 target molecule. For example, the activity of the effector molecule on an appropriate target can be determined, or the binding of the effector to an appropriate target can be determined, as previously described.

[0182] To identify compounds that interfere with the interaction between the target gene product and its cellular or extracellular binding partner(s), e.g., a substrate, a reaction mixture containing the target gene product and the binding partner is prepared, under conditions and for a time sufficient, to allow the two products to form complex. In order to test an inhibitory agent, the reaction mixture is provided in the presence and absence of the test compound. The test compound can be initially included in the reaction mixture, or can be added at a time subsequent to the addition of the target gene and its cellular or extracellular binding partner. Control reaction mixtures are incubated without the test compound or with a placebo. The formation of any complexes between the target gene product and the cellular or extracellular binding partner is then detected. The formation of a complex in the control reaction, but not in the reaction mixture containing the test compound, indicates that the compound interferes with the interaction of the target gene product and the interactive binding partner. Additionally, complex formation within reaction mixtures containing the test compound and normal target gene product can also be compared to complex formation within reaction mixtures containing the test compound and mutant target gene product. This comparison can be important in those cases wherein it is desirable to identify compounds that disrupt interactions of mutant but not normal target gene products.

[0183] These assays can be conducted in a heterogeneous or homogeneous format. Heterogeneous assays involve anchoring either the target gene product or the binding partner onto a solid phase, and detecting complexes anchored on the solid phase at the end of the reaction. In homogeneous assays, the entire reaction is carried out in a liquid phase. In either approach, the order of addition of reactants can be varied to obtain different information about the compounds being tested. For example, test compounds that interfere with the interaction between the target gene products and the binding partners, e.g., by competition, can be identified by conducting the reaction in the presence of the test substance. Alternatively, test compounds that disrupt preformed complexes, e.g., compounds with higher binding constants that displace one of the components from the complex, can be tested by adding the test compound to the reaction mixture after complexes have been formed. The various formats are briefly described below.

[0184] In a heterogeneous assay system, either the target gene product or the interactive cellular or extracellular binding partner, is anchored onto a solid surface (e.g., a microtitre plate), while the non-anchored species is labeled, either directly or indirectly. The anchored species can be immobilized by non-covalent or covalent attachments. Alternatively, an immobilized antibody specific for the species to be anchored can be used to anchor the species to the solid surface.

[0185] In order to conduct the assay, the partner of the immobilized species is exposed to the coated surface with or without the test compound. After the reaction is complete, unreacted components are removed (e.g., by washing) and any complexes formed will remain immobilized on the solid surface. Where the non-immobilized species is pre-labeled, the detection of label immobilized on the surface indicates that complexes were formed. Where the non-immobilized species is not pre-labeled, an indirect label can be used to detect complexes anchored on the surface; e.g., using a labeled antibody specific for the initially non-immobilized species (the antibody, in turn, can be directly labeled or indirectly labeled with, e.g., a labeled anti-Ig antibody). Depending upon the order of addition of reaction components, test compounds that inhibit complex formation or that disrupt preformed complexes can be detected.

[0186] Alternatively, the reaction can be conducted in a liquid phase in the presence or absence of the test compound, the reaction products separated from unreacted components, and complexes detected; e.g., using an immobilized antibody specific for one of the binding components to anchor any complexes formed in solution, and a labeled antibody specific for the other partner to detect anchored complexes. Again, depending upon the order of addition of reactants to the liquid phase, test compounds that inhibit complex or that disrupt preformed complexes can be identified.

[0187] In an alternate embodiment, a homogeneous assay can be used. For example, a preformed complex of the target gene product and the interactive cellular or extracellular binding partner product is prepared in that either the target gene products or their binding partners are labeled, but the signal generated by the label is quenched due to complex formation (see, e.g., U.S. Pat. No.4,109,496 that utilizes this approach for immunoassays). The addition of a test substance that competes with and displaces one of the species from the preformed complex will result in the generation of a signal above background. In this way, test substances that disrupt target gene product-binding partner interaction can be identified.

[0188] Also, binding partners of CDK10, FPGT, PCLO or REPS2 molecules can be identified in a two-hybrid assay or three-hybrid assay (see, e.g., U.S. Pat. No. 5,283,317; Zervos et al., Cell 72:223-232 (1993); Madura et al., J. Biol. Chem. 268: 12046-12054 (1993); Bartel et al., Biotechniques 14: 920-924 (1993); Iwabuchi et al., Oncogene 8: 1693-1696 (1993); and Brent WO94/10300), to identify other polypeptides, which bind to or interact with CDK10, FPGT, PCLO or REPS2 (“CDK10, FPGT PCLO or REPS2-binding polypeptides” or “CDK10, FPGT, PCLO or REPS2-bp”) and are involved in CDK10, FPGT, PCLO or REPS2 activity. Such CDK10, FPGT, PCLO or REPS2-bps can be activators or inhibitors of signals by the CDK10, FPGT, PCLO or REPS2 polypeptides or CDK10, FPGT, PCLO or REPS2 targets as, for example, downstream elements of a CDK10, FPGT, PCLO or REPS2-mediated signaling pathway.

[0189] A two-hybrid system is based on the modular nature of most transcription factors, which consist of separable DNA-binding and activation domains. Briefly, the assay utilizes two different DNA constructs. In one construct, the gene that codes for a CDK10, FPGT, PCLO or REPS2 polypeptide is fused to a gene encoding the DNA binding domain of a known transcription factor (e.g., GAL-4). In the other construct, a DNA sequence, from a library of DNA sequences, that encodes an unidentified polypeptide (“prey” or “sample”) is fused to a gene that codes for the activation domain of the known transcription factor. (Alternatively the: CDK10, FPGT, PCLO or REPS2 polypeptide can be the fused to the activator domain.) If the “bait” and the “prey” polypeptides are able to interact, in vivo, forming a CDK10, FPGT, PCLO or REPS2-dependent complex, the DNA-binding and activation domains of the transcription factor are brought into close proximity. This proximity allows transcription of a reporter gene (e.g., LacZ) which is operably linked to a transcriptional regulatory site responsive to the transcription factor. Expression of the reporter gene can be detected and cell colonies containing the functional transcription factor can be isolated and used to obtain the cloned gene which encodes the polypeptide which interacts with the CDK10, FPGT, PCLO or REPS2 polypeptide.

[0190] Candidate therapeutics for treating melanoma are identified from a group of test molecules that interact with a CDK10, FPGT, PCLO or REPS2 nucleic acid or polypeptide. Test molecules often are ranked according to the degree with which they interact or modulate (e.g., agonize or antagonize) DNA replication and/or processing, RNA transcription and/or processing, polypeptide production and/or processing, and/or function of CDK10, FPGT, PCLO or REPS2 molecules, for example, and then top ranking modulators are selected. Also, pharmacogenomic information described herein can determine the rank of a modulator. Candidate therapeutics typically are formulated for administration to a subject.

Therapeutic Treatments

[0191] Formulations or pharmaceutical compositions typically include in combination with a pharmaceutically acceptable carrier a compound, an antisense nucleic acid, a ribozyme, an antibody, a binding partner that interacts with a CDK10, FPGT, PCLO or REPS2 polypeptide, a CDK10, FPGT, PCLO or REPS2 nucleic acid, or a fragment thereof. The formulated molecule may be one that is identified by a screening method described above. Also, formulations may comprise a CDK10, FPGT, PCLO or REPS2 polypeptide or fragment thereof and a pharmaceutically acceptable carrier. As used herein, the term “pharmaceutically acceptable carrier” includes solvents, dispersion media, coatings, antibacterial and antifungal agents, isotonic and absorption delaying agents, and the like, compatible with pharmaceutical administration. Supplementary active compounds can also be incorporated into the compositions.

[0192] A pharmaceutical composition is formulated to be compatible with its intended route of administration. Examples of routes of administration include parenteral, e.g., intravenous, intradermal, subcutaneous, oral (e.g., inhalation), transdermal (topical), transmucosal, and rectal administration. Solutions or suspensions used for parenteral, intradermal, or subcutaneous application can include the following components: a sterile diluent such as water for injection, saline solution, fixed oils, polyethylene glycols, glycerin, propylene glycol or other synthetic solvents; antibacterial agents such as benzyl alcohol or methyl parabens; antioxidants such as ascorbic acid or sodium bisulfite; chelating agents such as ethylenediaminetetraacetic acid; buffers such as acetates, citrates or phosphates and agents for the adjustment of tonicity such as sodium chloride or dextrose. pH can be adjusted with acids or bases, such as hydrochloric acid or sodium hydroxide. The parenteral preparation can be enclosed in ampoules, disposable syringes or multiple dose vials made of glass or plastic.

[0193] Oral compositions generally include an inert diluent or an edible carrier. For the purpose of oral therapeutic administration, the active compound can be incorporated with excipients and used in the form of tablets, troches, or capsules, e.g., gelatin capsules. Oral compositions can also be prepared using a fluid carrier for use as a mouthwash. Pharmaceutically compatible binding agents, and/or adjuvant materials can be included as part of the composition. The tablets, pills, capsules, troches and the like can contain any of the following ingredients, or compounds of a similar nature: a binder such as microcrystalline cellulose, gum tragacanth or gelatin; an excipient such as starch or lactose, a disintegrating agent such as alginic acid, Primogel, or corn starch; a lubricant such as magnesium stearate or Sterotes; a glidant such as colloidal silicon dioxide; a sweetening agent such as sucrose or saccharin; or a flavoring agent such as peppermint, methyl salicylate, or orange flavoring.

[0194] Pharmaceutical compositions suitable for injectable use include sterile aqueous solutions (where water soluble) or dispersions and sterile powders for the extemporaneous preparation of sterile injectable solutions or dispersion. For intravenous administration, suitable carriers include physiological saline, bacteriostatic water, Cremophor EL™ (BASF, Parsippany, N.J.) or phosphate buffered saline (PBS). In all cases, the composition must be sterile and should be fluid to the extent that easy syringability exists. It should be stable under the conditions of manufacture and storage and must be preserved against the contaminating action of microorganisms such as bacteria and fungi. The carrier can be a solvent or dispersion medium containing, for example, water, ethanol, polyol (for example, glycerol, propylene glycol, and liquid polyethylene glycol, and the like), and suitable mixtures thereof. The proper fluidity can be maintained, for example, by the use of a coating such as lecithin, by the maintenance of the required particle size in the case of dispersion and by the use of surfactants. Prevention of the action of microorganisms can be achieved by various antibacterial and antifungal agents, for example, parabens, chlorobutanol, phenol, ascorbic acid, thimerosal, and the like. In many cases, it will be preferable to include isotonic agents, for example, sugars, polyalcohols such as mannitol, sorbitol, sodium chloride in the composition. Prolonged absorption of the injectable compositions can be brought about by including in the composition an agent which delays absorption, for example, aluminum monostearate and gelatin.

[0195] Sterile injectable solutions can be prepared by incorporating the active compound in the required amount in an appropriate solvent with one or a combination of ingredients enumerated above, as required, followed by filtered sterilization. Generally, dispersions are prepared by incorporating the active compound into a sterile vehicle which contains a basic dispersion medium and the required other ingredients from those enumerated above. In the case of sterile powders for the preparation of sterile injectable solutions, the methods of preparation often utilized are vacuum drying and freeze-drying which yields a powder of the active ingredient plus any additional desired ingredient from a previously sterile-filtered solution thereof.

[0196] For administration by inhalation, the compounds are delivered in the form of an aerosol spray from pressured container or dispenser which contains a suitable propellant, e.g., a gas such as carbon dioxide, or a nebulizer.

[0197] Systemic administration can also be by transmucosal or transdermal means. For transmucosal or transdermal administration, penetrants appropriate to the barrier to be permeated are used in the formulation. Such penetrants are generally known in the art, and include, for example, for transmucosal administration, detergents, bile salts, and fusidic acid derivatives. Transmucosal administration can be accomplished through the use of nasal sprays or suppositories. For transdermal administration, the active compounds are formulated into ointments, salves, gels, or creams (e.g., sunscreen) as generally known in the art. Molecules can also be prepared in the form of suppositories (e.g., with conventional suppository bases such as cocoa butter and other glycerides) or retention enemas for rectal delivery.

[0198] In one embodiment, active molecules are prepared with carriers that will protect the compound against rapid elimination from the body, such as a controlled release formulation, including implants and microencapsulated delivery systems. Biodegradable, biocompatible polymers can be used, such as ethylene vinyl acetate, polyanhydrides, polyglycolic acid, collagen, polyorthoesters, and polylactic acid. Methods for preparation of such formulations will be apparent to those skilled in the art. Materials can also be obtained commercially from Alza Corporation and Nova Pharmaceuticals, Inc. Liposomal suspensions (including liposomes targeted to infected cells with monoclonal antibodies to viral antigens) can also be used as pharmaceutically acceptable carriers. These can be prepared according to methods known to those skilled in the art, for example, as described in U.S. Pat. No. 4,522,811.

[0199] It is advantageous to formulate oral or parenteral compositions in dosage unit form for ease of administration and uniformity of dosage. Dosage unit form as used herein refers to physically discrete units suited as unitary dosages for the subject to be treated; each unit containing a predetermined quantity of active compound calculated to produce the desired therapeutic effect in association with the required pharmaceutical carrier.

[0200] Toxicity and therapeutic efficacy of such compounds can be determined by standard pharmaceutical procedures in cell cultures or experimental animals, e.g., for determining the LD₅₀ (the dose lethal to 50% of the population) and the ED₅₀ (the dose therapeutically effective in 50% of the population). The dose ratio between toxic and therapeutic effects is the therapeutic index and it can be expressed as the ratio LD₅₀/ED₅₀. Molecules which exhibit high therapeutic indices often are utilized. While molecules that exhibit toxic side effects may be used, care should be taken to design a delivery system that targets such compounds to the site of affected tissue in order to minimize potential damage to uninfected cells and, thereby, reduce side effects.

[0201] The data obtained from the cell culture assays and animal studies can be used in formulating a range of dosage for use in humans. The dosage of such molecules lies preferably within a range of circulating concentrations that include the ED₅₀ with little or no toxicity. The dosage may vary within this range depending upon the dosage form employed and the route of administration utilized. For any molecules used in the method, the therapeutically effective dose can be estimated initially from cell culture assays. A dose may be formulated in animal models to achieve a circulating plasma concentration range that includes the IC₅₀ (i.e., the concentration of the test compound which achieves a half-maximal inhibition of symptoms) as determined in cell culture. Such information can be used to more accurately determine useful doses in humans. Levels in plasma may be measured, for example, by high performance liquid chromatography.

[0202] As defined herein, a therapeutically effective amount of protein or polypeptide (i.e., an effective dosage) ranges from about 0.001 to 30 mg/kg body weight, sometimes about 0.01 to 25 mg/kg body weight, often about 0.1 to 20 mg/kg body weight, and more often about 1 to 10 mg/kg, 2 to 9 mg/kg, 3 to 8 mg/kg, 4 to 7 mg/kg, or 5 to 6 mg/kg body weight. The protein or polypeptide can be administered one time per week for between about 1 to 10 weeks, sometimes between 2 to 8 weeks, often between about 3 to 7 weeks, and more often for about 4, 5, or 6 weeks. The skilled artisan will appreciate that certain factors may influence the dosage and timing required to effectively treat a subject, including but not limited to the severity of the disease or disorder, previous treatments, the general health and/or age of the subject, and other diseases present. Moreover, treatment of a subject with a therapeutically effective amount of a protein, polypeptide, or antibody can include a single treatment or, preferably, can include a series of treatments.

[0203] With regard to polypeptide formulations, featured herein is a method for treating melanoma in a subject, which comprises contacting one or more cells in the subject with a first CDK10, FPGT, PCLO or REPS2 polypeptide, where genomic DNA in the subject comprises a second CDK10, FPGT, PCLO or REPS2 nucleic acid having one or more polymorphic variations associated with melanoma. The first CDK10, FPGT, PCLO or REPS2 polypeptide comprises fewer polymorphic variations associated with melanoma than the second CDK10, FPGT, PCLO or REPS2 polypeptide. The first and second CDK10, FPGT, PCLO or REPS2 polypeptides are encoded by a nucleic acid which comprises a nucleotide sequence selected from the group consisting of the nucleotide sequence of SEQ ID NO: 1, 2, 3 or 4; a nucleotide sequence which encodes a polypeptide consisting of an amino acid sequence set forth in FIGS. 8A-8C, 9, 10A-10B and 11; and a nucleotide sequence which encodes a polypeptide that is 90% or more identical to an amino acid sequence set forth in FIGS. 8A-8C, 9, 10A-10B and 11. The second CDK10, FPGT, PCLO or REPS2 polypeptide also may be encoded by a fragment of the foregoing nucleic acids comprising the one or more polymorphic variations. The subject is often a human.

[0204] For antibodies, a dosage of 0.1 mg/kg of body weight (generally 10 mg/kg to 20 mg/kg) is often utilized. If the antibody is to act in the brain, a dosage of 50 mg/kg to 100 mg/kg is often appropriate. Generally, partially human antibodies and fully human antibodies have a longer half-life within the human body than other antibodies. Accordingly, lower dosages and less frequent administration is often possible. Modifications such as lipidation can be used to stabilize antibodies and to enhance uptake and tissue penetration (e.g., into the brain). A method for lipidation of antibodies is described by Cruikshank et al., J. Acquired Immune Deficiency Syndromes and Human Retrovirology 14:193 (1997).

[0205] Antibody conjugates can be used for modifying a given biological response, the drug moiety is not to be construed as limited to classical chemical therapeutic agents. For example, the drug moiety may be a protein or polypeptide possessing a desired biological activity. Such proteins may include, for example, a toxin such as abrin, ricin A, pseudomonas exotoxin, or diphtheria toxin; a polypeptide such as tumor necrosis factor, .alpha.-interferon, .beta.-interferon, nerve growth factor, platelet derived growth factor, tissue plasminogen activator; or, biological response modifiers such as, for example, lymphokines, interleukin-1 (“IL-1”), interleukin-2 (“IL-2”), interleukin-6 (“IL-6”), granulocyte macrophage colony stimulating factor (“GM-CSF”), granulocyte colony stimulating factor (“G-CSF”), or other growth factors. Alternatively, an antibody can be conjugated to a second antibody to form an antibody heteroconjugate as described by Segal in U.S. Pat. No. 4,676,980.

[0206] For compounds, exemplary doses include milligram or microgram amounts of the compound per kilogram of subject or sample weight, for example, about 1 microgram per kilogram to about 500 milligrams per kilogram, about 100 micrograms per kilogram to about 5 milligrams per kilogram, or about 1 microgram per kilogram to about 50 micrograms per kilogram. It is understood that appropriate doses of a small molecule depend upon the potency of the small molecule with respect to the expression or activity to be modulated. When one or more of these small molecules is to be administered to an animal (e.g., a human) in order to modulate expression or activity of a polypeptide or nucleic acid, a physician, veterinarian, or researcher may, for example, prescribe a relatively low dose at first, subsequently increasing the dose until an appropriate response is obtained. In addition, it is understood that the specific dose level for any particular animal subject will depend upon a variety of factors including the activity of the specific compound employed, the age, body weight, general health, gender, and diet of the subject, the time of administration, the route of administration, the rate of excretion, any drug combination, and the degree of expression or activity to be modulated.

[0207] CDK10, FPGT, PCLO or REPS2 nucleic acid molecules can be inserted into vectors and used in gene therapy methods for treating melanoma. Featured herein is a method for treating melanoma in a subject, which comprises contacting one or more cells in the subject with a first CDK10, FPGT, PCLO or REPS2 nucleic acid. Genomic DNA in the subject comprises a second CDK10, FPGT, PCLO or REPS2 nucleic acid comprising one or more polymorphic variations associated with melanoma, and the first CDK10, FPGT, PCLO or REPS2 nucleic acid comprises fewer polymorphic variations associated with melanoma. The first and second CDK10, FPGT, PCLO or REPS2 nucleic acids typically comprise a nucleotide sequence selected from the group consisting of the nucleotide sequence of SEQ ID NO: 1, 2, 3 or 4; a nucleotide sequence which encodes a polypeptide consisting of an amino acid sequence set forth in FIGS. 8A-8C, 9, 10A-10B and 11; and a nucleotide sequence which encodes a polypeptide that is 90% or more identical to an amino acid sequence set forth in FIGS. 8A-8C, 9, 10A-10B and 11. The second CDK10, FPGT, PCLO or REPS2 nucleic acid may also be a fragment of the foregoing comprising one or more polymorphic variations. The subject is often a human.

[0208] Gene therapy vectors can be delivered to a subject by, for example, intravenous injection, local administration (see U.S. Pat. No. 5,328,470) or by stereotactic injection (see e.g., Chen et al., (1994) Proc. Natl. Acad. Sci. USA 91:3054-3057). Pharmaceutical preparations of gene therapy vectors can include a gene therapy vector in an acceptable diluent, or can comprise a slow release matrix in which the gene delivery vehicle is imbedded. Alternatively, where the complete gene delivery vector can be produced intact from recombinant cells (e.g., retroviral vectors) the pharmaceutical preparation can include one or more cells which produce the gene delivery system. Examples of gene delivery vectors are described herein.

[0209] Pharmaceutical compositions can be included in a container, pack, or dispenser together with instructions for administration.

[0210] Pharmaceutical compositions of active ingredients can be administered by any of the paths described herein for therapeutic and prophylactic methods for treating melanoma. With regard to both prophylactic and therapeutic methods of treatment, such treatments may be specifically tailored or modified, based on knowledge obtained from pharmacogenomic analyses described herein. As used herein, the term “treatment” is defined as the application or administration of a therapeutic agent to a patient, or application or administration of a therapeutic agent to an isolated tissue or cell line from a patient, who has a disease, a symptom of disease or a predisposition toward a disease, with the purpose to cure, heal, alleviate, relieve, alter, remedy, ameliorate, improve or affect the disease, the symptoms of disease or the predisposition toward disease. A therapeutic agent includes, but is not limited to, small molecules, peptides, antibodies, ribozymes and antisense oligonucleotides.

[0211] Administration of a prophylactic agent can occur prior to the manifestation of symptoms characteristic of the CDK10, FPGT, PCLO or REPS2 aberrance, such that a disease or disorder is prevented or, alternatively, delayed in its progression. Depending on the type of CDK10, FPGT, PCLO or REPS2 aberrance, for example, a CDK10, FPGT, PCLO or REPS2 molecule, CDK10, FPGT, PCLO or REPS2 agonist, or CDK10, FPGT, PCLO or REPS2 antagonist agent can be used for treating the subject. The appropriate agent can be determined based on screening assays described herein.

[0212] As discussed, successful treatment of CDK10, FPGT, PCLO or REPS2 disorders can be brought about by techniques that serve to inhibit the expression or activity of target gene products. For example, compounds (e.g., an agent identified using an assays described above) that exhibit negative modulatory activity can be used to prevent and/or treat melanoma. Such molecules can include, but are not limited to peptides, phosphopeptides, small organic or inorganic molecules, or antibodies (including, for example, polyclonal, monoclonal, humanized, anti-idiotypic, chimeric or single chain antibodies, and FAb, F(ab′)₂ and FAb expression library fragments, scFV molecules, and epitope-binding fragments thereof).

[0213] Further, antisense and ribozyme molecules that inhibit expression of the target gene can also be used to reduce the level of target gene expression, thus effectively reducing the level of target gene activity. Still further, triple helix molecules can be utilized in reducing the level of target gene activity. Antisense, ribozyme and triple helix molecules are discussed above.

[0214] It is possible that the use of antisense, ribozyme, and/or triple helix molecules to reduce or inhibit mutant gene expression can also reduce or inhibit the transcription (triple helix) and/or translation (antisense, ribozyme) of mRNA produced by normal target gene alleles, such that the concentration of normal target gene product present can be lower than is necessary for a normal phenotype. In such cases, nucleic acid molecules that encode and express target gene polypeptides exhibiting normal target gene activity can be introduced into cells via gene therapy method. Alternatively, in instances in that the target gene encodes an extracellular polypeptide, it can be preferable to co-administer normal target gene polypeptide into the cell or tissue in order to maintain the requisite level of cellular or tissue target gene activity.

[0215] Another method by which nucleic acid molecules may be utilized in treating or preventing a disease characterized by CDK10, FPGT, PCLO or REPS2 expression is through the use of aptamer molecules specific for CDK10, FPGT, PCLO or PEPS2 polypeptide. Aptamers are nucleic acid molecules having a tertiary structure which permits them to specifically bind to polypeptide ligands (see, e.g., Osborne, et al., Curr. Opin. Chem. Biol.1(1): 5-9 (1997); and Patel, D. J., Curr. Opin. Chem. Biol. June;1(1): 3246 (1997)). Since nucleic acid molecules may in many cases be more conveniently introduced into target cells than therapeutic polypeptide molecules may be, aptamers offer a method by which CDK10, FPGT, PCLO or REPS2 polypeptide activity may be specifically decreased without the introduction of drugs or other molecules which may have pluripotent effects.

[0216] Antibodies can be generated that are both specific for target gene product and that reduce target gene product activity. Such antibodies may, therefore, by administered in instances whereby negative modulatory techniques are appropriate for the treatment of CDK10, FPGT, PCLO or REPS2 disorders. For a description of antibodies, see the Antibody section above.

[0217] In circumstances where injection of an animal or a human subject with a CDK10, FPGT, PCLO or REPS2 polypeptide or epitope for stimulating antibody production is harmful to the subject, it is possible to generate an immune response against CDK10, FPGT, PCLO or REPS2 through the use of anti-idiotypic antibodies (see, for example, Herlyn, D., Ann. Med.;31(1): 66-78 (1999); and Bhattacharya-Chatterjee & Foon, Cancer Treat. Res.; 94: 51-68 (1998)). If an anti-idiotypic antibody is introduced into a mammal or human subject, it should stimulate the production of anti-anti-idiotypic antibodies, which should be specific to the CDK10, FPGT, PCLO or AEPS2 polypeptide. Vaccines directed to a disease characterized by CDK10, FPGT, PCLO or REPS2 expression may also be generated in this fashion.

[0218] In instances where the target antigen is intracellular and whole antibodies are used, internalizing antibodies often are utilized. Lipofectin or liposomes can be used to deliver the antibody or a fragment of the Fab region that binds to the target antigen into cells. Where fragments of the antibody are used, the smallest inhibitory fragment that binds to the target antigen often are utilized. For example, peptides having an amino acid sequence corresponding to the Fv region of the antibody can be used. Alternatively, single chain neutralizing antibodies that bind to intracellular target antigens can also be administered. Such single chain antibodies can be administered, for example, by expressing nucleotide sequences encoding single-chain antibodies within the target cell population (see e.g., Marasco et al., Proc. Natl. Acad. Sci. USA 90: 7889-7893 (1993)).

[0219] CDK10, FPGT, PCLO or REPS2 molecules and compounds that inhibit target gene expression, synthesis and/or activity can be administered to a patient at therapeutically effective doses to prevent, treat or ameliorate CDK10, FPGT, PCLO or REPS2 disorders. A therapeutically effective dose refers to that amount of the compound sufficient to result in amelioration of symptoms of the disorders.

[0220] Toxicity and therapeutic efficacy of such compounds can be determined by standard pharmaceutical procedures in cell cultures or experimental animals, e.g., for determining the LD₅₀ (the dose lethal to 50% of the population) and the ED₅₀ (the dose therapeutically effective in 50% of the population). The dose ratio between toxic and therapeutic effects is the therapeutic index and it can be expressed as the ratio LD₅₀/ED₅₀. Compounds that exhibit large therapeutic indices often are utilized. While compounds that exhibit toxic side effects can be used, care should be taken to design a delivery system that targets such compounds to the site of affected tissue in order to minimize potential damage to uninfected cells and, thereby, reduce side effects.

[0221] Data obtained from cell culture assays and animal studies can be used in formulating a range of dosage for use in humans. The dosage of such compounds lies preferably within a range of circulating concentrations that include the ED₅₀ with little or no toxicity. The dosage can vary within this range depending upon the dosage form employed and the route of administration utilized. For any compound used, the therapeutically effective dose can be estimated initially from cell culture assays. A dose can be formulated in animal models to achieve a circulating plasma concentration range that includes the IC₅₀ (i.e., the concentration of the test compound that achieves a half-maximal inhibition of symptoms) as determined in cell culture. Such information can be used to more accurately determine useful doses in humans. Levels in plasma can be measured, for example, by high performance liquid chromatography.

[0222] Another example of effective dose determination for an individual is the ability to directly assay levels of “free” and “bound” compound in the serum of the test subject. Such assays may utilize antibody mimics and/or “biosensors” that have been created through molecular imprinting techniques. The compound which is able to modulate CDK10, FPGT, PCLO or REPS2 activity is used as a template, or “imprinting molecule”, to spatially organize polymerizable monomers prior to their polymerization with catalytic reagents. The subsequent removal of the imprinted molecule leaves a polymer matrix which contains a repeated “negative image” of the compound and is able to selectively rebind the molecule under biological assay conditions. A detailed review of this technique can be seen in Ansell et al., Current Opinion in Biotechnology 7: 89-94 (1996) and in Shea, Trends in Polymer Science 2: 166-173 (1994). Such “imprinted” affinity matrixes are amenable to ligand-binding assays, whereby the immobilized monoclonal antibody component is replaced by an appropriately imprinted matrix. An example of the use of such matrixes in this way can be seen in Vlatakis, et al., Nature 361: 645-647 (1993). Through the use of isotope-labeling, the “free” concentration of compound which modulates the expression or activity of CDK10, FPGT, PCLO or REPS2 can be readily monitored and used in calculations of IC₅₀. Such “imprinted” affinity matrixes can also be designed to include fluorescent groups whose photon-emitting properties measurably change upon local and selective binding of target compound. These changes can be readily assayed in real time using appropriate fiberoptic devices, in turn allowing the dose in a test subject to be quickly optimized based on its individual IC₅₀. A rudimentary example of such a “biosensor” is discussed in Kriz et al., Analytical Chemistry 67: 2142-2144 (1995).

[0223] Provided herein are methods of modulating CDK10, FPGT, PCLO or REPS2 expression or activity for therapeutic purposes. Accordingly, in an exemplary embodiment, the modulatory method involves contacting a cell with CDK10, FPGT, PCLO or REPS2 or an agent that modulates one or more activities of CDK10, FPGT, PCLO or REPS2 polypeptide activity associated with the cell. An agent that modulates CDK10, FPGT, PCLO or REPS2 polypeptide activity can be an agent as described herein, such as a nucleic acid or a polypeptide, a naturally-occurring target molecule of a CDK10, FPGT, PCLO or REPS2 polypeptide (e.g., a CDK10, FPGT, PCLO or REPS2 substrate or receptor), a CDK10, FPGT, PCLO or REPS2 antibody, a CDK10, FPGT, PCLO or REPS2 agonist or antagonist, a peptidomimetic of a CDK10, FPGT, PCLO or REPS2 agonist or antagonist, or other small molecule.

[0224] In one embodiment, the agent stimulates one or more CDK10, FPGT, PCLO or REPS2 activities. Examples of such stimulatory agents include active CDK10, FPGT, PCLO or REPS2 polypeptide and a nucleic acid molecule encoding CDK10, FPGT, PCLO or REPS2. In another embodiment, the agent inhibits one or more CDK10, FPGT,PCLO or REPS2 activities. Examples of such inhibitory agents include antisense CDK10, FPGT, PCLO or REPS2 nucleic acid molecules, anti-CDK10, FPGT, PCLO or REPS2 antibodies, and CDK10, FPGT, PCLO or REPS2 inhibitors. These modulatory methods can be performed invitro (e.g., by culturing the cell with the agent) or, alternatively, in vivo (e.g., by administering the agent to a subject). As such, provided are methods of treating an individual afflicted with a disease or disorder characterized by aberrant or unwanted expression or activity of a CDK10, FPGT, PCLO or REPS2 polypeptide or nucleic acid molecule. In one embodiment, the method involves administering an agent (e.g., an agent identified by a screening assay described herein), or combination of agents that modulates (e.g., upregulates or downregulates) CDK10, FPGT, PCLO or REPS2 expression or activity. In another embodiment, the method involves administering a CDK10, FPGT, PCLO or REPS2 polypeptide or nucleic acid molecule as therapy to compensate for reduced, aberrant, or unwanted CDK10, FPGT, PCLO or REPS2 expression or activity.

[0225] Stimulation of CDK10, FPGT, PCLO or REPS2 activity is desirable in situations in which CDK10, FPGT, PCLO or REPS2 is abnormally downregulated and/or in which increased CDK10, FPGT, PCLO or REPS2 activity is likely to have a beneficial effect. For example, stimulation of CDK10, FPGT, PCLO or REPS2 activity is desirable in situations in which a CDK10, FPGT, PCLO or REPS2 is downregulated and/or in which increased CDK10, FPGT, PCLO or REPS2 activity is likely to have a beneficial effect. Likewise, inhibition of CDK10, FPGT, PCLO or REPS2 activity is desirable in situations in which CDK10, FPGT, PCLO or REPS2 is abnormally upregulated and/or in which decreased CDK10, FPGT, PCLO or REPS2 activity is likely to have a beneficial effect.

[0226] The examples set forth below are intended to illustrate but not limit the invention.

### EXAMPLES

[0227] In the following studies a group of subjects was selected according to specific parameters pertaining to melanoma. Nucleic acid samples obtained from individuals in the study group were subjected to genetic analyses that identified associations between melanoma and certain polymorphic variants in human genomic DNA. This procedure was repeated in a second group of subjects that served as a replication cohort. Polymorphic variants proximal to the incident SNPs were identified and analyzed in cases and controls. In addition, methods are described for producing target polypeptides encoded by the target nucleic acids in vitro or in vivo, which can be utilized in methods that screen test molecules for those that interact with target polypeptides. Test molecules identified as being interactors with target polypeptides can be screened further as melanoma therapeutics. Also, methods are described for comparing the expression of target mRNA in cancer and non-cancer cells, producing siRNA molecules capable of inhibiting target expression, measuring the effect of siRNA molecules on cellular proliferation of the target, and screening for target inhibitors.

### Example 1

Samples and Pooling Strategies

Sample Selection

[0228] Blood samples were collected from individuals diagnosed with melanoma, which were referred to as casesamples. Also, blood samples were collected from individuals not diagnosed with melanoma or a history of melanoma; these samples served as gender and age-matched controls. A database was created that listed all phenotypic trait information gathered from individuals for each case and control sample. Genomic DNA was extracted from each of the blood samples for genetic analyses.

DNA Extraction from Blood Samples

[0229] Six to ten milliliters of whole blood was transferred to a 50 ml tube containing 27 ml of red cell lysis solution (RCL). The tube was inverted until the contents were mixed. Each tube was incubated for 10 minutes at room temperature and inverted once during the incubation. The tubes were then centrifuged for 20 minutes at 3000×g and the supernatant was carefully poured off. 100-200 μl of residual liquid was left in the tube and was pipetted repeatedly to resuspend the pellet in the residual supernatant. White cell lysis solution (WCL) was added to the tube and pipetted repeatedly until completely mixed. While no incubation was normally required, the solution was incubated at 37° C. or room temperature if cell clumps were visible after mixing until the solution was homogeneous. Two ml of protein precipitation was added to the cell lysate. The mixtures were vortexed vigorously at high speed for 20 sec to mix the protein precipitation solution uniformly with the cell lysate, and then centrifuged for 10 minutes at 3000×g. The supernatant containing the DNA was then poured into a clean 15 ml tube, which contained 7 ml of 100% isopropanol. The samples were mixed by inverting the tubes gently until white threads of DNA were visible. Samples were centrifuged for 3 minutes at 2000×g and the DNA was visible as a small white pellet. The supernatant was decanted and 5 ml of 70% ethanol was added to each tube. Each tube was inverted several times to wash the DNA pellet, and then centrifuged for 1 minute at 2000×g. The ethanol was decanted and each tube was drained on clean absorbent paper. The DNA was dried in the tube by inversion for 10 minutes, and then 1000 μl of 1× TE was added. The size of each sample was estimated, and less TE buffer was added during the following DNA hydration step if the sample was smaller. The DNA was allowed to rehydrate overnight at room temperature, and DNA samples were stored at 2-8° C.

[0230] DNA was quantified by placing samples on a hematology mixer for at least 1 hour. DNA was serially diluted (typically 1:80, 1:160, 1:320, and 1:640 dilutions) so that it would be within the measurable range of standards. 125 μl of diluted pNA was transferred to a clear U-bottom microtitre plate, and 125 μl of 1× TE buffer was trafeqrred intoeach welldsing a multichannel pipette. The DNA and 1× TE were mixed by repeated pipetting at least 15 times, and then the plates were sealed. 50 μl of diluted-DNA was added to wells A5-H12 of a black flat bottom microtitre plate. Standards were inverted six times to mix them, and then 50 μl of 1× TE buffer was pipetted into well A1, 1000 ng/ml of standard was pipetted into well A2, 500 ng/ml of standard was pipetted into well A3, and 250 ng/ml of standard. was pipetted into well A4. PicoGreen (Molecular Probes, Eugene, Oreg.) was thawed and freshly diluted 1:200 according to the number of plates that were being measured. PicoGreen was vortexed and then 50 μl was pipetted into all wells of the black plate with the diluted DNA. DNA and PicoGreen were mixed by pipetting repeatedly at least 10 times with the multichannel pipette. The plate was placed into a Fluoroskan Ascent Machine (microplate fluorometer produced by Labsystems) and the samples were allowed to incubate for 3 minutes before the machine was run using filter pairs 485 nm excitation and 538 nm emission wavelengths. Samples having measured DNA concentrations of greater than 450 ng/μl were re-measured for conformation. Samples having measured DNA concentrations of 20 ng/μl or less were re-measured for confirmation.

Pooling Strategies

[0231] Samples were placed into one of four groups, based on gender and disease status. The four groups were male case samples, male control samples, female case samples, and female control samples. A select set of samples from each group were utilized to generate pools, and one pool was created for each group. Each individual sample in a pool was represented by an equal amount of genomic DNA. For example, where 25 ng of genomic DNA was utilized in each PCR reaction and there were 200 individuals in each pool, each individual would provide 125 pg of genomic DNA. Inclusion or exclusion of samples for a pool was based upon the following criteria: the sample was derived from an individual characterized as Caucasian; the sample was derived from an individual of German paternal and maternal descent; the database included relevant phenotype information for the individual; case samples were derived from individuals diagnosed with melanoma; control samples were derived from individuals free of cancer; and sufficient genomic DNA was extracted from each blood sample for all allelotyping and genotyping reactions performed during the study. Phenotype information included sex of the individual, number of nevi (few, moderate, numerous), hair color (black, brown, blond, red), diagnosed with melanoma (tumor thickness, date of primary diagnosis, age of individual as of primary diagnosis, post-operative tumor classification, presence of nodes, occurrence of metastases, subtype, location), country or origin of mother and father, presence of certain conditions for each individual (coronary heart disease, cardiomyopathy, arteriosclerosis, abnormal blood clotting/thrombosis, emphysema, asthma, diabetes type 1, diabetes type 2, Alzheimer's disease, epilepsy, schizophrenia, manic depression/bipolar disorder, autoimmune disease, thyroid disorder, and hypertension), presence of cancer in the donor individual or blood relative (melanoma, basaliom/spinaliom/lentigo malignant/mycosis fungoides, breast cancer, colon cancer, rectum cancer, lung cancer, lung cancer, bronchus cancer, prostate cancer, stomach cancer, leukemia, lymphoma, or other cancer in donor, donor parent, donor aunt or uncle, donor offspring or donor grandparent. Samples that met these criteria were added to appropriate pools based on gender and disease status.

[0232] The selection process yielded the pools set forth in Table 1, which were used in the studies that follow:

TABLE 1

| | Male | Male | Female | Female |
|---|---|---|---|---|
| | control | case | control | case |
| Pool size (Number) | 217 | 236 | 233 | 266 |
| Pool Criteria | control | Case | control | case |
| (ex: case/control) | | | | |
| Mean Age (ex: years) | 48 | 51 | 47 | 49 |

### Example 2

Association of NRPI Polymorphic Variants with Melanoma

[0233] A whole-genome screen was performed to identify particular SNPs associated with occurrence of melanoma. As described in Example 1, two sets of samples were utilized: female individuals having melanoma (female cases) and samples from female individuals not having melanoma or any history of melanoma (female controls), and male individuals having melanoma (male cases) and samples from male individuals not having melanoma or any history of melanoma (male controls). The initial screen of each pool was performed in an allelotyping study, in which certain samples in each group were pooled. By pooling DNA from each group, an allele frequency for each SNP in each group was calculated. These allele frequencies were then compared to one another. Particular SNPs were considered as being associated with melanoma when allele frequency differences calculated between case and control pools were statistically significant. SNP disease association results obtained from the allelotyping study were then validated by genotyping each associated SNP across all samples from each pool. The results of the genotyping were then analyzed, allele frequencies for each group were calculated from the individual genotyping results, and a p-value was calculated to determine whether the case and control groups had statistically significantly differences in allele frequencies for a particular SNP. When the genotyping results agreed with the original allelotyping results, the SNP disease association was considered validated at the genetic level.

SNP Panel Used for Genetic Analyses

[0234] A whole-genome SNP screen began with an initial screen of approximately 25,000 SNPs over each set of disease and control samples using a pooling approach. The pools studied in the screen are described in Example 1. The SNPs analyzed in this study were part of a set of 25,488 SNPs confirmed as being statistically polymorphic as each is characterized as having a minor allele frequency of greater than 10%. The SNPs in the set reside in genes or in close proximity to genes, and many reside in gene exons. Specifically, SNPs in the set are located in exons, introns, and within 5,000 base-pairs upstream of a transcription start site of a gene. In addition, SNPs were selected according to the following criteria: they are located in ESTs; they are located in Locuslink or Ensembl genes; and they are located in Genomatix promoter predictions. SNPs in the set were also selected on the basis of even spacing across the genome, as depicted in Table 2.

TABLE 2

| General Statistics | | | Spacing Statistics | | |
|---|---|---|---|---|---|
| Total # of SNPs | 25,488 | | Median | 37,058 | bp |
| # of Exonic SNPs | >4,335 | (17%) | Minimum* | 1,000 | bp |
| # SNPs with | 20,776 | (81%) | Maximum* | 3,000,000 | bp |
| refSNP ID | | | Mean | 122,412 | bp |
| Gene Coverage | >10,000 | | Std | 373,325 | bp |

| | | |
|---|---|---|
| Chromosome | All | Deviation |
| Coverage | | |

*Excludes outliers

Genotyping Results

[0235] The genetic studies summarized above and described in more detail below identified allelic variants associated with melanoma. The allelic variants identified from the SNP panel described in Table 2 are summarized below in Table 3.

TABLE 3

| | | | | | | | Melanoma |
|---|---|---|---|---|---|---|---|
| SNP | Chromosome | Contig | Contig | Sequence | Sequence | Allelic | Associated |
| Reference | Position | Identification | Position | Identification | Position | Variability | Allele |
| rs8404 | 89465509 | NT_010542 | 1319962 | NM_003674 | UTR | C/T | C |
| rs1044639 | 82049807 | NT_007933 | 7685796 | XM_168530 | UTR | C/A | A |
| rs2034453 | 74096924 | NT_004464 | 5157491 | NM_003838 | intragenic | A/G | A |
| | | | | NM_015978 | intronic | | |
| rs1904528 | 16205791 | NT_011757 | 3918204 | NM_004726 | UTR | C/T | C |

[0236] Table 3 includes information pertaining to the incident polymorphic variant associated with melanoma identified herein. Public information pertaining to the polymorphism and the genomic sequence that includes the polymorphism are indicated. The genomic sequence identified in Table 3 may be accessed at the http address www.ncbi.nih.gov/entrez/query.fcgi, for example, by using the publicly available SNP reference number (e.g., rs8404). The chromosome position refers to the position of the SNP within NCBI's Genome Build 33, which may be accessed at the following http address: www.ncbi.nlm.nih.gov/mapview/map_search.cgi?chr=hum_chr.inf&query=. The “Contig Position” provided in Table 3 corresponds to a nucleotide position set forth in the contig sequence, and designates the polymorphic site corresponding to the SNP reference number. The sequence containing the polymorphisms also may be referenced by the “Sequence Identification” set forth in Table 3. The “Sequence Identification” corresponds to cDNA sequence that encodes associated target polypeptides (e.g., CDK10) of the invention. The position of the SNP within the cDNA sequence is provided in the “Sequence Position” column of Table 3. In the case of rs2034453, the genetic evidence suggests an association with a region on chromosome 1 band p31.1 that includes two genes: fucose-1-phosphate guanylyltransferase (FPGT) (NM_{—}003838) and cardiac ankyrin repeat kinase (CARK) (NM_{—}015978). Also, the allelic variation at the polymorphic site and the allelic variant identified as associated with melanoma is specified in Table 3. All nucleotide sequences referenced and accessed by the parameters set forth in Table 3 are incorporated herein by reference.

Assay for Verifying, Allelotyping and Genotyping SNPs

[0237] A MassARRAY™ system (Sequenom, Inc.) was utilized to perform SNP genotyping in a high-throughput fashion. This genotyping platform was complemented by a homogeneous, single-tube assay method (hME™ or homogeneous MassEXTEND™ (Sequenom, Inc.)) in which two genotyping primers anneal to and amplify a genomic target surrounding a polymorphic site of interest. A third primer (the MassEXTEND™ primer), which is complementary to the amplified target up to but not including the polymorphism, was then enzymatically extended one or a few bases through the polymorphic site and then terminated.

[0238] For each polymorphism, SpectroDESIGNER™ software (Sequenom, Inc.) was used to generate a set of PCR primers and a MassEXTEND™ primer which where used to genotype the polymorphism. Other primer design software could be used or one of ordinary skill in the art could manually design primers based on his or her knowledge of the relevant factors and considerations in designing such primers. Table 4 shows PCR printers and Table 5 shows extension primers used for analyzing the polymorphism set forth in Table 3. The initial PCR amplification reaction was performed in a 5 μl total volume containing 1×PCR buffer with 1.5 mM MgCl₂(Qiagen), 200 μM each of dATP, dGTP, dCTP, dTTP (Gibco-BRL), 2.5 ng of genomic DNA, 0.1 units of HotStar DNA polymerase (Qiagen), and 200 nM each of forward and reverse PCR primers specific for the polymorphic region of interest.

TABLE 4

PCR Primers

| SNP | | |
|---|---|---|
| Reference | Forward PCR primer | Reverse PCR primer |
| rs8404 | ACGTTGGATGGCCTCCTGTTGGGTCCTC | ACGTTGGATGAAGGTATGGGGTGGGAGC |
| rs1044639 | CGCAAACAAAAAGGACACAC | CTCCTTTGTTTCCACCATCC |
| rs2034453 | TTGCTGGACAATAGAAAGAC | GTGACTGGAAACTGAGAATG |
| rs1904528 | GAAGACTGAAAAAAATCCACG | GCTATCTCTTTCACATTGCTC |

[0239] Samples were incubated at 95° C. for 15 minutes, followed by 45 cycles of 95° C. for 20 seconds, 56° C. for 30 seconds, and 72° C. for 1 minute, finishing with a 3 minute final extension at 72° C. Following amplification, shrimp alkaline phosphatase (SAP) (0.3 units in a 2 μl volume) (Amersham Pharmacia) was added to each reaction (total reaction volume was 7 μl) to remove any residual dNTPs that were not consumed in the PCR step. Samples were incubated for 20 minutes at 37° C., followed by 5 minutes at 85° C. to denature the SAP.

[0240] Once the SAP reaction was complete, a primer extension reaction was initiated by adding a polymorphism-specific MassEXTEND™ primer cocktail to each sample. Each MassEXTEND™ cocktail included a specific combination of dideoxynucleotides (ddNTPs) and deoxynucleotides (dNTPs) used to distinguish polymorphic alleles from one another. Methods for verifying, allelotyping and genotyping SNPs are disclosed, for example, in U.S. Pat. No. 6,258,538, the content of which is hereby incorporated by reference. In Table 5, ddNTPs are shown and the fourth nucleotide not shown is the dNTP.

TABLE 5

Extension Primers

| SNP | | |
|---|---|---|
| Reference | Extend Primers | Termination Mix |
| rs8404 | CGAGACTACCAGGAGAGCCC | ACG |
| rs1044639 | CATCCATCCAACCTGGCTC | CGT |
| rs2034453 | AAACTGAGAATGTTGATGGACA | ACT |
| rs1904528 | TCACATTGCTCTGCACTTTTG | ACG |

[0241] The MassEXTEND™ reaction was performed in a total volume of 9 μl, with the addition of 1× ThermoSequenase buffer, 0.576 units of ThermoSequenase (Amersham Pharmacia), 600 nM MassEXTEND™ primer, 2 mM of ddATP and/or ddCTP and/or ddGTP and/or ddTTP, and 2 mM of dATP or dCTP or dGTP or dTTP. The deoxy nucleotide (dNTP) used in the assay normally was complementary to the nucleotide at the polymorphic site in the amplicon. Samples were incubated at 94° C. for 2 minutes, followed by 55 cycles of 5 seconds at 94° C., 5 seconds at 52° C., and 5 seconds at 72° C.

[0242] Following incubation, samples were desalted by adding 16 μl of water (total reaction volume was 25 μl), 3 mg of SpectroCLEAN™ sample cleaning beads (Sequenom, Inc.) and allowed to incubate for 3 minutes with rotation. Samples were then robotically dispensed using a piezoelectric dispensing device (SpectroJET™ (Sequenom, Inc.)) onto either 96-spot or 384-spot silicon chips containing a matrix that crystallized each sample (SpectroCHIP™ (Sequenom, Inc.)). Subsequently, MALDI-TOF mass spectrometry (Biflex and Autoflex MALDI-TOF mass spectrometers (Bruker Daltonics) can be used) and SpectroTYPER RT™ software (Sequenom, Inc.) were used to analyze and interpret the SNP genotype for each sample.

Genetic Analysis

[0243] The minor allelic frequency for the polymorphism set forth in Table 3 was verified as being 10% or greater using the extension assay described above in a group of samples isolated from 92 individuals originating from the state of Utah in the United States, Venezuela and France (Coriell cell repositories).

[0244] Genotyping results for the allelic variant set forth in Table 3 are shown for females in Table 6 and for males in Table 7. In Table 6, “F case” and “F control” refer to female case and female control groups, and in Table 7, “M case” and “M control” refer to male case and male control groups.

TABLE 6
Female Genotyping Results

| SNP | | | | |
|---|---|---|---|---|
| Reference | F case | F control | p-value | Odds Ratio |
| rs8404 | C = 0.144 | C = 0.094 | 0.016 | 0.62 |
| | T = 0.856 | T = 0.906 | | |
| rs1044639 | A = 0.614 | A = 0.528 | 0.006 | 1.42 |
| | C = 0.386 | C = 0.472 | | |
| rs2034453 | G = 0.854 | G = 0.901 | 0.023 | 0.64 |
| | A = 0.146 | A = 0.099 | | |
| rs1904528 | T = 0.771 | T = 0.838 | 0.008 | 0.65 |
| | C = 0.229 | C = 0.162 | | |

[0245] TABLE 7
Male Genotyping Results

| SNP | | | | |
|---|---|---|---|---|
| Reference | M case | M control | p-value | Odd Ratio |
| rs8404 | C = 0.136 | C = 0.098 | 0.071 | 0.69 |
| | T = 0.864 | T = 0.902 | | |
| rs1044639 | A = 0.611 | A = 0.551 | 0.072 | 1.28 |
| | C = 0.389 | C = 0.449 | | |
| rs2034453 | G = 0.896 | G = 0.890 | 0.767 | 1.07 |
| | A = 0.104 | A = 0.110 | | |
| rs1904528 | T = 0.790 | T = 0.822 | 0.396 | 0.82 |
| | C = 0.210 | C = 0.178 | | |

[0246] Odds ratio results are shown in Tables 6 and 7. An odds ratio is an unbiased estimate of relative risk which can be obtained from most case-control studies. Relative risk (RR) is an estimate of the likelihood of disease in the exposed group (susceptibility allele or genotype carriers) compared to the unexposed group (not carriers). It can be calculated by the following equation:
RR=I_{A}/Iₐ
[0247] I_{A} is the incidence of disease in the A carriers and Iₐ is the incidence of disease in the non-carriers.
[0248] RR>1 indicates the A allele increases disease susceptibility.
[0249] RR<1 indicates the a allele increases disease susceptibility.
[0250] For example, RR=1.5 indicates that carriers of the A allele have 1.5 times the risk of disease than non-carriers, i.e., 50% more likely to get the disease.
[0251] Case-control studies do not allow the direct estimation of I_{A} and Iₐ, therefore relative risk cannot be directly estimated. However, the odds ratio (OR) can be calculated using the following equation:
   OR=(n_{DA}n_{da})/(n_{dA}n_{Da})=p_{DA}(1−p_{dA})/p_{dA}(1−p_{DA}), or
   OR=((case f)/(1−case f))/((control f)/(1−control f)), where f=susceptibility allele frequency.

[0252] An odds ratio can be interpreted in the same way a relative risk is interpreted and can be directly estimated using the data from case-control studies, i.e., case and control allele frequencies. The higher the odds ratio value, the larger the effect that particular allele has on the development of melanoma, thus possessing that particular allele translates to having a higher risk of developing melanoma.

[0253] The single marker alleles set forth in Table 3 were considered validated, since the genotyping data for the females, males or both pools were significantly associated with melanoma, and because the genotyping results agreed with the original allelotyping results. Particularly significant associations with melanoma are indicated by a calculated p-value of less than 0.05 for genotype results, which are set forth in bold text.

### Example 3

Samples and Pooling Strategies for the Replication Cohort

[0254] The single marker alleles set forth in Table 3 were genotyped again in a replication cohort to further validate their association with melanoma. Like the original study population described in Examples 1 and 2, the replication cohort consisted of individuals diagnosed with melanoma (cases) and individuals free of melanoma (controls). The case and control samples were selected and genotyped as described below.

Sample Selection

[0255] Blood samples were collected from individuals diagnosed with melanoma, which were referred to case samples. Also, blood samples were collected from individuals not diagnosed with me lanoma or a history of melanoma; these samples served as gender and age-matched controls.

DNA Extraction from Blood Samples

[0256] Blood samples for DNA preparation were taken in 5 EDTA tubes. If it was not possible to get a blood sample from a patient, a sample from the cheek mucosa was taken. Red blood cells were lysed to facilitate their separation from the white blood cells. The white cells were pelletted and lysed to release the DNA. Lysis was done in the presence of a DNA preservative using an anionic detergent to solubilize the cellular components. Contaminating RNA was removed by treatment with an RNA digesting enzyme. Cytoplasmic and nuclear proteins were removed by salt precipitation.

[0257] Genomic DNA was then isolated by precipitation with alcohol (2-propanol and then ethanol) and rehydrated in water. The DNA was transferred to 2-ml tubes and stored at 4° C. for short-term storage and at −70° C. for long-term storage.

Pooling Strategies

[0258] Samples were placed into one of four groups based on disease status. The four groups were female case samples, female control samples, male case samples, and male control samples. A select set of samples from each group were utilized to generate pools, and one pool was created for each group.

[0259] Replication samples were obtained from QIMR (Queensland Institute of Medical Research) through Nick Martin. All samples are of Australian descent. Sample sources were as follows: a.) Queensland Familial Melanoma Study—702 cutaneous malignant melanoma cases plus 46 unaffected relatives; and b.) Twin mole study—2367 controls, consisting of adolescent twins and siblings closest in age that had nevi counted and other skin and pigmentary phenotypes assessed. The subjects available for replication from Australia included 702 mostly unrelated melanoma cases from the Queensland Familial Melanoma study and 2367 controls from the Twin Mole study with subjects organized into pedigrees with up to eight unaffected individuals.

[0260] To facilitate a direct comparison with the discovery study design and subsequent meta analyses, we selected a subset of the Australian sample to produce a research data set of unrelated cases and controls. For cases, this was done by selecting the proband from all families within the familial melanoma study. For controls, this was accomplished by selecting the pedigree founders from the twin study, usually the father and mother of the collected twins. The resulting data set consisted of 376 female and 300 male cases, and 640 female and 515 male controls.

### Example 4

Association of Polymorphic Variants with Melanoma in the Replication Cohort

[0261] The associated SNPs from the initial scan were re-validated by genotyping the associated SNP across the replication cohort described in Example 3. The results of the genotyping were then analyzed, allele frequencies for each group were calculated from the individual genotyping results, and a p-value was calculated to determine whether the case and control groups had statistically significantly differences in allele frequencies for a particular SNP. The replication genotyping results were considered significant with a calculated p-value of less than 0.05 for genotype results, which are set forth in bold text. See Tables 8 and 9 herein.

Assay for Verifying Allelotyping, and Genotyping SNPs

[0262] Genotyping of the replication cohort was performed using the same methods used for the original genotyping, as described herein. A MassARRAY™ system (Sequenom, Inc.) was utilized to perform SNP genotyping in a high-throughput fashion. This genotyping platform was complemented by a homogeneous, single-tube assay method (hME™ or homogeneous MassEXTEND™ (Sequenom, Inc.)) in which two genotyping primers anneal to and amplify a genomic target surrounding a polymorphic site of interest. A third primer (the MassEXTEND™ primer), which is complementary to the amplified target up to but not including the polymorphism, was then enzymatically extended one or a few bases through the polymorphic site and then terminated.

[0263] For each polymorphism, SpectroDESIGNER™ software (Sequenom, Inc.) was used to generate a set of PCR primers and a MassEXTEND™ primer which where used to genotype the polymorphism. Other primer design software could be used or one of ordinary skill in the art could manually design primers based on his or her knowledge of the relevant factors and considerations in designing such primers. Table 4 shows PCR primers and Table 5 shows extension probes used for analyzing (e.g., genotyping) polymorphisms. The initial PCR amplification reaction was performed in a 5 μl total volume containing 1× PCR buffer with 1.5 mM MgCl₂ (Qiagen), 200 μM each of dATP, dGTP, dCTP, dTTP (Gibco-BRL), 2.5 ng of genomic DNA, 0.1 units of HotStar DNA polymerase (Qiagen), and 200 nM each of forward and reverse PCR primers specific for the polymorphic region of interest.

[0264] Samples were incubated at 95° C. for 15 minutes, followed by 45 cycles of 95° C. for 20 seconds, 56° C. for 30 seconds, and 72° C. for 1 minute, finishing with a 3 minute final extension at 72° C. Following amplification, shrimp alkaline phosphatase (SAP) (0.3 units in a 2 μl volume) (Amersham Pharmacia) was added to each reaction (total reaction volume was 7 μl) to remove any residual dNTPs that were not consumed in the PCR step. Samples were incubated for 20 minutes at 37° C., followed by 5 minutes at 85° C. to denature the SAP.

[0265] Once the SAP reaction was complete, a primer extension reaction was initiated by adding a polymorphism-specific MassEXTEND™ primer cocktail to each sanple. Each MassEXTEND™ cocktail included a specific combination of dideoxynucleotides (ddNTPs) and deoxynucleotides (dNTPs) used to distinguish polymorphic alleles from one another. Methods for verifying, allelotyping and genotyping SNPs are disclosed, for example, in U.S. Pat. No. 6,258,538, the content of which is hereby incorporated by reference. In Table 5, ddNTPs are shown and the fourth nucleotide not shown is the dNTP.

[0266] The MassEXTEND™ reaction was performed in a total volume of 9 μl, with the addition of 1× ThermoSequenase buffer, 0.576 units of ThermoSequenase (Amersham Pharmacia), 600 nM MassEXTEND™ primer, 2 mM of ddATP and/or ddCTP and/or ddGTP and/or ddTTP, and 2 mM of dATP or dCTP or dGTP or dTTP. The deoxy nucleotide (dNTP) used in the assay normally was complementary to the nucleotide at the polymorphic site in the amplicon. Samples were incubated at 94° C. for 2 minutes, followed by 55 cycles of 5 seconds at 94° C., 5 seconds at 52° C., and 5 seconds at 72° C.

[0267] Following incubation, samples were desalted by adding 16 μl of water (total reaction volume was 25 μl), 3 mg of SpectroCLEAN™ sample cleaning beads (Sequenom, Inc.) and allowed to incubate for 3 minutes with rotation. Samples were then robotically dispensed using a piezoelectric dispensing device (SpectroJET™ (Sequenom, Inc.)) onto either 96-spot or 384-spot silicon chips containing a matrix that crystallized each sample (SpectroCHIP™ (Sequenom, Inc.)). Subsequently, MALDI-TOF mass spectrometry (Biflex and Autoflex MALDI-TOF mass spectrometers (Bruker Daltonics) can be used) and SpectroTYPER RT™ software (Sequenom, Inc.) were used to analyze and interpret the SNP genotype for each sample.

Genetic Analysis

[0268] The minor allelic frequencies for the polymorphisms set forth in Table 3 were verified as being 10% or greater using the extension assay described above in a group of samples isolated from 92 individuals originating from the state of Utah in the United States, Venezuela and France (Coriell cell repositories).

[0269] Replication genotyping results are shown for females and males in Table 8. P-values and odds ratios are provided in Table 9.

TABLE 8
Female and Male Replication Genotyping Results

| | | | Allele frequency- females | | | Allele frequency- males | | |
|---|---|---|---|---|---|---|---|---|
| Incident SNP | RS ID | Gene | Case | Control | Delta | Case | Control | Delta |
| FCH-0186 | 8404 | CDK10 | 0.87 | 0.91 | −0.043 | 0.88 | 0.91 | −0.029 |
| GP01_084009695 | 2034453 | FPGT | 0.85 | 87.00 | −0.022 | 0.84 | 0.87 | −0.026 |
| GP01_084009695 | 2034453 | LOC51086 (CARK) | 0.85 | 87.00 | −0.022 | 0.84 | 0.87 | −0.026 |
| GP07_082717580 | 1044639 | PCLO | 0.60 | 0.57 | 0.031 | 0.61 | 0.56 | 0.042 |
| GP-X_017643141 | 1904528 | REPS2 | 0.78 | 0.79 | −0.005 | 0.77 | 0.82 | −0.051 |

[0270] TABLE 9
Female and Male Replication Genotyping Analysis

| | | | Replication F | | Replication M | | Summary | |
|---|---|---|---|---|---|---|---|---|
| Incident SNP | RS ID | Gene | p-value | OR | p-value | OR | p-value | OR |
| FCH-0186 | 8404 | CDK10 | 0.002 | 0.65 | 0.054 | 0.72 | 0.000004 | 0.67 |
| GP01_084009695 | 2034453 | FPGT | 0.170 | 0.83 | 0.150 | 0.81 | 0.014000 | 0.82 |
| GP01_084009695 | 2034453 | LOC51086 (CARK) | 0.170 | 0.83 | 0.150 | 0.81 | 0.014000 | 0.82 |
| GP07_082717580 | 1044639 | PCLO | 0.180 | 1.13 | 0.100 | 1.19 | 0.000290 | 1.23 |
| GP-X_017643141 | 1904528 | REPS2 | 0.800 | 0.97 | 0.076 | 0.73 | 0.033000 | 0.80 |

[0271] Meta analyses, combining the results of the German discovery sample and the Australian replication sample, were carried out using a random effects (DerSimonian-Laird) procedure. Statistically significant associations with melanoma are indicated by a calculated p-value of less than 0.05 for genotype results, which are set forth in bold text.

[0272] The absence of a statistically significant association in the replication cohort should not be interpreted as minimizing the value of the original finding. There are many reasons why a biologically derived association identified in a sample from one population would not replicate in a sample from another population. The most important reason is differences in population history. Due to bottlenecks and founder effects, there may be common disease predisposing alleles present in one population that are relatively rare in another, leading to a lack of association in the candidate region. Also, because common diseases such as melanoma are the result of susceptibilities in many genes and many environmental risk factors, differences in population-specific genetic and environmental backgrounds could mask the effects of a biologically relevant allele.

### Example 5

CDK10 Proximal SNPs

[0273] It has been discovered that a polymorphic variation (rs8404) in the untranslated region of a gene encoding cyclin-dependent kinase 10 (CDK10) is associated with the occurrence of melanoma. See Table 3. Subsequently, ninety-three allelic variants located within or nearby the target gene were identified and subsequently allelotyped in melanoma case and control sample sets as described in Examples 1 and 2. The polymorphic variants are set forth in Table 10. The chromosome position provided in column four of Table 10 is based on Genome “Build 33” of NCBI's GenBank.

TABLE 10

| | | | | | Allele | |
|---|---|---|---|---|---|---|
| dbSNP | | Position in | Chromosome | Allele | Present | IUPAC |
| rs# | Chromosome | | Position | Variants | in FIG. 1 | Code |
| 460879 | 16 | 139 | 89415739 | T/C | C | Y |
| 460984 | 16 | 424 | 89416024 | T/C | C | Y |
| 2437957 | 16 | 2898 | 89418498 | C/T | G | R |
| 3815949 | 16 | 3166 | 89418766 | C/G | C | S |
| 2437956 | 16 | 3501 | 89419101 | G/A | T | Y |
| 2437955 | 16 | 3525 | 89419125 | G/T | C | M |
| 2434872 | 16 | 4165 | 89419765 | C/G | C | S |
| 467357 | 16 | 4647 | 89420247 | G/A | A | R |
| 258337 | 16 | 7960 | 89423560 | A/T | T | W |
| 258336 | 16 | 8081 | 89423681 | T/G | T | K |
| 258335 | 16 | 8194 | 89423794 | A/G | G | R |
| 164752 | 16 | 9640 | 89425240 | G/A | G | R |
| 154663 | 16 | 13285 | 89428885 | T/C | T | Y |
| 164753 | 16 | 14845 | 89430445 | T/C | C | Y |
| 258332 | 16 | 14933 | 89430533 | G/A | G | R |
| 2010623 | 16 | 16275 | 89431875 | C/T | A | R |
| 187283 | 16 | 16586 | 89432186 | G/A | A | R |
| 258330 | 16 | 16824 | 89432424 | T/G | T | K |
| 258328 | 16 | 17564 | 89433164 | C/T | C | Y |
| 459920 | 16 | 18077 | 89433677 | T/C | T | Y |
| 166297 | 16 | 18435 | 89434035 | G/A | A | R |
| 258318 | 16 | 19300 | 89434900 | T/C | T | Y |
| 258317 | 16 | 19488 | 89435088 | C/T | C | Y |
| 171805 | 16 | 20864 | 89436464 | G/A | A | R |
| 2081984 | 16 | 21176 | 89436776 | C/T | C | Y |
| 464586 | 16 | 21338 | 89436938 | C/T | A | R |
| 460319 | 16 | 21343 | 89436943 | G/T | G | K |
| 447735 | 16 | 21599 | 89437199 | A/G | T | Y |
| 2377058 | 16 | 22081 | 89437681 | T/C | A | R |
| 604868 | 16 | 23427 | 89439027 | G/A | T | Y |
| 2118193 | 16 | 27153 | 89442753 | C/T | G | R |
| 467035 | 16 | 27535 | 89443135 | C/G | C | S |
| 2115401 | 16 | 27859 | 89443459 | C/T | T | Y |
| 417323 | 16 | 33527 | 89449127 | T/G | T | K |
| 2377233 | 16 | 34152 | 89449752 | C/G | G | S |
| 3751700 | 16 | 39455 | 89455055 | G/A | G | R |
| 2277905 | 16 | 39762 | 89455362 | A/G | A | R |
| 397891 | 16 | 40292 | 89455892 | C/G | G | S |
| 3794638 | 16 | 40697 | 89456297 | G/T | C | M |
| 3794637 | 16 | 40831 | 89456431 | G/A | C | Y |
| 258324 | 16 | 41516 | 89457116 | C/A | T | K |
| 258323 | 16 | 41955 | 89457555 | C/G | G | S |
| 2075880 | 16 | 42477 | 89458077 | A/G | A | R |
| 258322 | 16 | 43164 | 89458764 | C/T | A | R |
| 258321 | 16 | 43734 | 89459334 | C/T | A | R |
| 164744 | 16 | 44029 | 89459629 | A/C | T | K |
| 164743 | 16 | 44692 | 89460292 | A/G | T | Y |
| 164742 | 16 | 44986 | 89460586 | C/T | A | R |
| 187282 | 16 | 46234 | 89461834 | T/C | A | R |
| 465507 | 16 | 47754 | 89463354 | G/C | C | S |
| 2162943 | 16 | 47914 | 89463514 | G/A | C | Y |
| 1946482 | 16 | 49672 | 89465272 | T/C | T | Y |
| 4247353 | 16 | 50476 | 89466076 | T/C | T | Y |
| 462769 | 16 | 50525 | 89466125 | A/G | T | Y |
| 3803690 | 16 | 50621 | 89466221 | C/G | G | S |
| 417414 | 16 | 53410 | 89469010 | A/G | C | Y |
| 154661 | 16 | 53833 | 89469433 | G/C | G | S |
| 4785704 | 16 | 59632 | 89475232 | G/A | A | R |
| 4785584 | 16 | 59646 | 89475246 | C/T | T | Y |
| 4785585 | 16 | 59667 | 89475267 | C/T | C | Y |
| 4785705 | 16 | 59676 | 89475276 | T/C | C | Y |
| 4785586 | 16 | 59678 | 89475278 | G/A | G | R |
| 4785587 | 16 | 59881 | 89475481 | A/G | G | R |
| 2016968 | 16 | 60168 | 89475768 | C/G | C | S |
| 3751693 | 16 | 61658 | 89477258 | C/T | G | R |
| 3809646 | 16 | 74117 | 89489717 | A/G | C | Y |
| 4785590 | 16 | 77429 | 89493029 | G/C | G | S |
| 2099105 | 16 | 80817 | 89496417 | A/G | T | Y |
| 4785708 | 16 | 83831 | 89499431 | C/T | C | Y |
| 4785710 | 16 | 84018 | 89499618 | T/C | C | Y |
| 4785591 | 16 | 84775 | 89500375 | C/T | C | Y |
| 4785592 | 16 | 84777 | 89500377 | C/G | G | S |
| 4785593 | 16 | 84889 | 89500489 | C/T | C | Y |
| 4785711 | 16 | 85208 | 89500808 | C/G | C | S |
| 4785712 | 16 | 85216 | 89500816 | G/C | C | S |
| 4785713 | 16 | 85360 | 89500960 | G/C | C | S |
| 4785714 | 16 | 85666 | 89501266 | C/A | C | M |
| 4785594 | 16 | 85778 | 89501378 | C/G | G | S |
| 3803689 | 16 | 87320 | 89502920 | A/G | C | Y |
| 4785715 | 16 | 87397 | 89502997 | G/A | A | R |
| 3764258 | 16 | 88276 | 89503876 | C/G | C | S |
| 4785716 | 16 | 88389 | 89503989 | T/C | T | Y |
| 4785717 | 16 | 88395 | 89503995 | G/A | A | R |
| 2077001 | 16 | 89352 | 89504952 | C/T | G | R |
| 2377049 | 16 | 90230 | 89505830 | A/C | T | K |
| 2003522 | 16 | 90548 | 89506148 | C/G | C | S |
| 1230 | 16 | 92117 | 89507717 | C/T | C | Y |
| 1800359 | 16 | 92523 | 89508123 | A/G | A | R |
| 1061646 | 16 | 93239 | 89508839 | T/C | G | R |
| 1800358 | 16 | 96581 | 89512181 | C/T | T | Y |
| 2286392 | 16 | 96811 | 89512411 | C/T | A | R |
| 2074904 | 16 | 98808 | 89514408 | T/C | A | R |
| 2074903 | 16 | 98925 | 89514525 | A/G | T | Y |

Assay for Verifying and Allelotyping SNPs

[0274] The methods used to verify and allelotype the ninety-three proximal SNPs of Table 10 are the same methods described in Examples 1 and 2 herein. The primers and probes used in these assays are provided in Table 11 and Table 12, respectively.

TABLE 11

| | | |
|---|---|---|
| dbSNP | Forward | Reverse |
| rs# | PCR primer | PCR primer |

| | | |
|---|---|---|
| 460879 | ACGTTGGATGTCCAGCCTCTAACCCACAAC | ACGTTGGATGCGAAACGCTGTGTCACCAAC |
| 460984 | ACGTTGGATGATGCTCTGGACAACAGGTGG | ACGTTGGATGTGAGGGAACGAAAAGTGCAG |
| 2437957 | ACGTTGGATGATCCAGCTTCCCTCAACCTC | ACGTTGGATGCAGCTCAGAGTTGACGGAAG |
| 3815949 | ACGTTGGATGTTTTTCTGCAGAAGGGCCTG | ACGTTGGATGCACACACCACCAAGCTCTTC |
| 2437956 | ACGTTGGATGTCAACACTGGGCTCCTAGGG | ACGTTGGATGTCTCCTGACCTCGTGATCTG |
| 2437955 | ACGTTGGATGTCAACACTGGGCTCCTAGGG | ACGTTGGATGTCTCCTGACCTCGTGATCTG |
| 2434872 | ACGTTGGATGTAGACACCAGCTCTGTAGGG | ACGTTGGATGATTACAGGCATGAGCCACTG |
| 467357 | GGCGCACGCCTCCACGTCATCTCTGTGCTCT | GGCGCACGCCTGTGTGGTGCAGCCCAGAAT |
| | GGACG | |
| 258337 | ACGTTGGATGTAGAATCCAAAAGATGGTGG | ACGTTGGATGTGCTGGGATTACAGGTGAAC |
| 258336 | ACGTTGGATGCTTTGAGGAGAAAGAGTCTG | ACGTTGGATGTTAAAGCCAGGGTTTGAGGC |
| 258335 | ACGTTGGATGTCCTGACCTCAAGTGATCTG | ACGTTGGATGAAAGAGCTGATTTCCAGCGG |
| 164752 | ACGTTGGATGAAGTGCTGGAATTACAGCCG | ACGTTGGATGAAAATATGCTGGCCAGGCCG |
| 154663 | ACGTTGGATGATTGCTCGAACCTTGAACCG | ACGTTGGATGGACAGAGTCTCACTCTGTAG |
| 164753 | ACGTTGGATGAGTGAGAAGAACAGAAGGGC | ACGTTGGATGGCCAAGCCACATCAATATCC |
| 258332 | ACGTTGGATGTGTGTCCTCACCCAAATCTC | ACGTTGGATGCCTGCCCCCATAATTCAATC |
| 2010623 | ACGTTGGATGCCATGACGCCCAGCTAATTT | ACGTTGGATGAACCAGGAGTTTGAGGCCAG |
| 187283 | ACGTTGGATGCCGGGTTCAAGCAATTCTTC | ACGTTGGATGAATTACCCAGGCATGGTGGC |
| 258330 | ACGTTGGATGGCTTTTTTCACTCAGCATGG | ACGTTGGATGGGTAGAGTATACTTAATTGC |
| 258328 | ACGTTGGATGTCAGGTTTCACCATGTTGCC | ACGTTGGATGCAGAACTTTGGGAAGCCTAG |
| 459920 | GGCGCACGCCTCCACGAACAGCCATGTGTAA | GGCGCACGCCTAATCGCAGGAGAGACACAC |
| | CCCTC | |
| 166297 | ACGTTGGATGACTTCATTCCTTGAACCGGG | ACGTTGGATGACTGCATTCTCATGAGGAGC |
| 258318 | ACGTTGGATGTGCGTCTGGCCTAATATTTC | ACGTTGGATGCACTATTGAAATTTTCTAGTC |
| 258317 | ACGTTGGATGTGAACTCCTGACCTCAAGTG | ACGTTGGATGGCCAAGTGTAGTGATTCACG |
| 171805 | ACGTTGGATGACCATGGTCTGCTTGGCAAC | ACGTTGGATGGCCTTTTGTTATGCCCAGAC |
| 2081984 | ACGTTGGATGTTCCAAGTAGCTGGGACCAC | ACGTTGGATGTATTACACTGGAACAGCTCG |
| 464586 | ACGTTGGATGGACCTTCAAGATCCTGTCTC | ACGTTGGATGATAGCCTCATCTGTGTCAGC |
| 460319 | ACGTTGGATGGACCTTCAAGATCCTGTCTC | ACGTTGGATGATAGCCTCATCTGTGTCAGC |
| 447735 | GGCGCACGCCTCCACGATGGCTTGGCTTGTC | GGCGCACGCCCACAGCAGCTTCTGCTATAG |
| | TGTAC | |
| 2377058 | ACGTTGGATGGGGTTAGAAGACTCAGTCAC | ACGTTGGATGTACCAAGTGTCCCACAAAGC |
| 604868 | GGCGCACGCCTCCACGCAACCCTGGTGTACC | GGCGCACGCCCTGCCCCCGCCGTGAGAAA |
| | CTCC | |
| 2118193 | ACGTTGGATGTTTTTGAGACGGAGTCTCGC | ACGTTGGATGAGGAGAATGGCTGAACCTGG |
| 467035 | ACGTTGGATGCGTGTCTGTTTCCACTCTTG | ACGTTGGATGCCCTGTGTAGAAAAGAAGGC |
| 2115401 | ACGTTGGATGTGGCATCTTTGGGCGTTTTG | ACGTTGGATGCAACCCGCTTCAGCCTTGAG |
| 417323 | ACGTTGGATGGAGGACTGAAGAAAGAATTTG | ACGTTGGATGGCGAGACTCTGTCTCAAATA |
| 2377233 | ACGTTGGATGTCTCTTTTTGGACTTCAGGG | ACGTTGGATGTCCCACAGTGCTAGGATTAC |
| 3751700 | ACGTTGGATGTCAGGTCTTCCATGAGTGAG | ACGTTGGATGTTCAAGCTTAGCTTCTGGGC |
| 2277905 | ACGTTGGATGTCCTCCAGTTGGGAGTCCTT | ACGTTGGATGCACCTGGAAGACTCTCTCAC |
| 397891 | GGCGCACGCCTCCACGCGGGAGCGTCTCTTG | GGCGCACGCCCAGGCGCGAAAGCTCCTTC |
| | GTAAC | |
| 3794638 | ACGTTGGATGAGCCTGCTCTTCCCAAGTCC | ACGTTGGATGCGGTCCCTGGAGATCTGAG |
| 3794637 | ACGTTGGATGGAGCCTTCAAGCTCGAACTC | ACGTTGGATGAGCCGCGAGCCACTTGTTTG |
| 258324 | ACGTTGGATGAAGCAGAGGATGTGAGAAGG | ACGTTGGATGAAGCATCTGGCCTGTCACTC |
| 258323 | ACGTTGGATGCACGCCCAGCTAATTTTTTC | ACGTTGGATGAGTCAGGAGATCTAGAGCAC |
| 2075880 | ACGTTGGATGAAGTGCTGGGATTACAAGCG | ACGTTGGATGAAAGCATTGGCCCAGTATCG |
| 258322 | ACGTTGGATGTCTGAAACAGGGCAGAAACC | ACGTTGGATGGGATGCTTACGTTTACCCAG |
| 258321 | ACGTTGGATGTTGGCAACAGAGTGAGACCC | ACGTTGGATGAGCTTCCAGAATGACCTACG |
| 164744 | ACGTTGGATGTCAGTCCCCACTCTGTGCAA | ACGTTGGATGACAGAGCAAAGTTGGGCACC |
| 164743 | ACGTTGGATGAAAAGTGCTTATTGGGCCGG | ACGTTGGATGAACTGCCGACCTCAGGTGAT |
| 164742 | ACGTTGGATGAACGAGCGAAACTCCGTCTC | ACGTTGGATGTGATAGCAGGTGCTGCAGTG |
| 187282 | GGCGCACGCCTCCACGTGGGAACCCCTGAG | GGCGCACGCCGTTGGAAGCACAAATTCGGC |
| | CTTTTA | |
| 465507 | GGCGCACGCCTCCACGAAGCACCCACCTCAA | TCCGAGTTGGGACAGGTTTC |
| | TACGG | |
| 2162943 | ACGTTGGATGTGAGCTCAGGAACCAGGTGAC | ACGTTGGATGCAGCATCGACATGTGGTGAG |
| 1946482 | ACGTTGGATGTCCTCGCTATGTTGGAAATG | ACGTTGGATGACCACAACTCAAAGACAGCG |
| 4247353 | ACGTTGGATGAGCTGCTGTGACACCCAAGG | ACGTTGGATGAAGCTCTGCTGGAGCCAATC |
| 462769 | ACGTTGGATGAAGCCAGGTCAGCCGTGCA | ACGTTGGATGTCCTCAAGGGCCTGTTGGTG |
| 3803690 | ACGTTGGATGACACTCGTGTGGAGAATCCC | ACGTTGGATGTCCCTGCAGTACGGAGTACG |
| 417414 | ACGTTGGATGCCACACCCAGCTCATTTTTG | ACGTTGGATGGAGATTGACACCAGCCTAAC |
| 154661 | GGCGCACGCCTCCACGCCCTTGAGGCCTCCC | GGCGCACGCCGGCCAGGAAGCAGCAGAAC |
| | AGGG | |
| 4785704 | ACGTTGGATGCACGCCCGGCTGATTTTTTG | ACGTTGGATGCACGAGGTCAGGAGATCAAG |
| 4785584 | ACGTTGGATGTAATCCCAGCACTTTGGGAG | ACGTTGGATGGGTTTCACCGTGTTAGCCAG |
| 4785585 | ACGTTGGATGCCTGTAATCCCAGCACTTTG | ACGTTGGATGAGGATGGTCTTGATCTCCTG |
| 4785705 | ACGTTGGATGAGGATGGTCTTGATCTCCTG | ACGTTGGATGCCTGTAATCCCAGCACTTTG |
| 4785586 | ACGTTGGATGATCTCCTGACCTCGTGATCC | ACGTTGGATGAAATCCTACAAATGGCCGGG |
| 4785587 | ACGTTGGATGAACAAATCCTGGCGTGGGAG | ACGTTGGATGGGATACAGCTGAGCCAGGAC |
| 2016968 | ACGTTGGATGGACACTTCTGTCTCCCTATG | ACGTTGGATGAAAAGCAGTAGCTGTGGACC |
| 3751693 | ACGTTGGATGATCAGGTACCTGCATGGATG | ACGTTGGATGGCAGACACTACCTTCTGGAG |
| 3809646 | ACGTTGGATGAAAAATGCACGAACGCACGG | ACGTTGGATGTAGAGGAGATGTAGCAGGAG |
| 4785590 | ACGTTGGATGACCTCTTGCTGGTGCTAGAC | ACGTTGGATGCTAGAGCAGTGGAGACATTC |
| 2099105 | ACGTTGGATGATCAGAGGCTGCATAGCACC | ACGTTGGATGGATGACTAGAAGGGAGACTG |
| 4785708 | ACGTTGGATGTGTTCATGCTGAAGCTGCTG | ACGTTGGATGGAAAAGAGAAACGGGAGCAG |
| 4785710 | ACGTTGGATGTTGTTCCCAGGAGTCATGGC | ACGTTGGATGAGGTGTCCTGGGATTCAGAC |
| 4785591 | ACGTTGGATGATTGGGTGGCCCCTTGTTTG | ACGTTGGATGGAGGAGGTGAGTGGTCATTG |
| 4785592 | ACGTTGGATGATTGGGTGGCCCCTTGTTTG | ACGTTGGATGGAGGAGGTGAGTGGTCATTG |
| 4785593 | ACGTTGGATGCGCACTGAGAAGAACTGTTG | ACGTTGGATGGGCTAGGTCATGAAAACCAG |
| 4785711 | ACGTTGGATGTAAAGAGTGCATTGAGGCCG | ACGTTGGATGAACTCCTGACCTCATGATCC |
| 4785712 | ACGTTGGATGCAAAGTGCTGGGATTACAGG | ACGTTGGATGAACAACATGAGACCCTGTCG |
| 4785713 | ACGTTGGATGAAGTGAGCCTCTCACCTCAG | ACGTTGGATGTAGTTTACACTGCCGAGTCC |
| 4785714 | ACGTTGGATGCTGTGAAGGACTGAAAGCTC | ACGTTGGATGTGAGAGCAGTGGTGAGAGAA |
| 4785594 | ACGTTGGATGGCACTTGTGGTTCCTTTCTG | ACGTTGGATGTATCGTGGTGAAGAAGTTCC |
| 3803689 | ACGTTGGATGGTGTTTCTGCAGCCTAACTC | ACGTTGGATGTAGGACTGCTTCAGGTCTCG |
| 4785715 | ACGTTGGATGTGAAGCAGTCCTAGCCAGTG | ACGTTGGATGAAGAAACTTCTAGACCCCCC |
| 3764258 | ACGTTGGATGTTCATGCCTTCTGCCTTGCC | ACGTTGGATGATCTCAGCCTTCCAAAGTGC |
| 4785716 | ACGTTGGATGATGAAGGCACACCAGCTCTG | ACGTTGGATGTAATGACACGACCTACACAC |
| 4785717 | ACGTTGGATGATGAAGGCACACCAGCTCTG | ACGTTGGATGCGGTCTTAATGACACGACCT |
| 2077001 | ACGTTGGATGAGGCTAAGGCAGTAGGATTG | ACGTTGGATGTTTGGTAAAGACGGCCTCAC |
| 2377049 | ACGTTGGATGCACAAAGTGCTCAATCCCAG | ACGTTGGATGACCATATTGATTGGGCTGGG |
| 2003522 | ACGTTGGATGCTGAGATTGGGCTGTTGCAC | ACGTTGGATGCTTGGCATTTTACTCTACGC |
| 1230 | GGCGCACGCCTCCACGTCTCCTCGACTGCTT | GGCGCACGCCCCAGTGGTTTATTTTCCCGC |
| | TAGTG | |
| 1800359 | GGCGCACGCCTCCACGAAAGAGCTTCTCACA | GGCGCACGCCGGCAGCTGTCAATTCTCATG |
| | CGTGG | |
| 1061646 | GGCGCACGCCTCCACGATAGGCAGAGATGTC | AAAAAGCGAAAGGCAGCAGC |
| | CAGAG | |
| 1800358 | GGCGCACGCCTCCACGTTCTCTCTGTCCCAG | GGCGCACGCCAATCGCAAAGTGCAGTGCAG |
| | TTTCC | |
| 2286392 | ACGTTGGATGCAGGTCCACGTGAGAGTGTG | ACGTTGGATGCAGTCAGCAGCTCTCAGAAC |
| 2074904 | ACGTTGGATGTGTAGTGGCCTGTAGGAGCA | ACGTTGGATGAGATGAGGGTGGCTGAGATG |
| 2074903 | ACGTTGGATGCGTCAATTAAGGCTCAAAGC | ACGTTGGATGCCTTCTCCAAATTCCACGTC |

[0275] TABLE 12

| | | |
|---|---|---|
| dbSNP | Extend | Term |
| rs# | Probe | Mix |

| | | |
|---|---|---|
| 460879 | ACCAACCCCACGCTCTG | ACT |
| 460984 | CTTGTGAAGCTGAGTGG | ACT |
| 2437957 | CGGAAGGTGGATCAGCG | ACG |
| 3815949 | TCCAGCTGCTTTCCCCC | ACT |
| 2437956 | TCGGCCTCCCAAAGAGC | ACG |
| 2437955 | ACAGGCGTGAGCCACCG | CGT |
| 2434872 | GCGGATCCTATCATTTTTA | ACT |
| 467357 | GTGCAGCCCAGAATGGTTTC | ACG |
| 258337 | AAAGAATCCCAAGGGAC | CGT |
| 258336 | CTGGGCCAATTTAAAAGT | ACT |
| 258335 | TTTCCAGCGGTACAGTC | ACT |
| 164752 | GCTCAGGCCTGTAACCC | ACG |
| 154663 | GTGCGATCTCGCTCACC | ACT |
| 164753 | TCCTAACAGCTGCCACA | ACT |
| 258332 | CCATAATTCAATCACCTCC | ACG |
| 2010623 | GCCAACGTGGCGAAACC | ACG |
| 187283 | GGCGCACACCTGTAGTC | ACG |
| 258330 | AAGAGAAATGGAACACTTC | ACT |
| 258328 | CAGGCAGATCACTTGAG | ACG |
| 459920 | CCTCCCTCTTCCTCATTCC | ACT |
| 166297 | CTCTTCTAAGCCCATTC | ACG |
| 258318 | GACTTATTTCATCTTCCTCA | ACT |
| 258317 | ATTCACGCCTGTAATCC | ACG |
| 171805 | AGGGCTCCTTGGTCTAG | ACG |
| 2081984 | GGCACCTGGGTGACTTG | ACG |
| 464586 | CTAAGCACTGAGCGATA | ACG |
| 460319 | CTGCACTAAGCACTGAG | CGT |
| 447735 | TTCTGCTATAGGTCTCTGACA | ACT |
| 2377058 | CCACAAAGCTGTAAAACA | ACT |
| 604868 | CGCCGTGAGAAACTGCAG | ACG |
| 2118193 | GCAGTGAGCTGGGATCG | ACG |
| 467035 | AAGAAGGCACCAGACTC | ACT |
| 2115401 | CCTTGAGCACTGGAGTC | ACG |
| 417323 | ACACTTTTTATATTTGACAAACTT | ACT |
| 2377233 | GCTAGGATTACAGGTGT | ACT |
| 3751700 | CAGCTATGTCAGCATTC | ACG |
| 2277905 | CTCTCACCTGGAGGACC | ACT |
| 397891 | AAGCTCCTTCCCGGGCTTC | ACT |
| 3794638 | GGCTCAGGGATGCCTCG | CGT |
| 3794637 | TGTGGGGAGAATTTACA | ACG |
| 258324 | TGATGGCCTAGTCTCAA | CGT |
| 258323 | TAGAGCACCCTGACTAA | ACT |
| 2075880 | CCACCTTTTCTCATCAGA | ACT |
| 258322 | ACCCAGAAATGGTACAA | ACG |
| 258321 | GTGGTGTTTTTGGTTTTTT | ACG |
| 164744 | CCCCTGCCCAGTTCAAA | ACT |
| 164743 | GTGCTGGGATTACAGGC | ACT |
| 164742 | CCCCACCTCAGGGAGAA | ACG |
| 187282 | CACAAATTCGGCTGAGGCCT | ACT |
| 465507 | GGACAGGTTTCCAGGCCA | ACT |
| 2162943 | CATGTGGTGAGGAGATA | ACG |
| 1946482 | CACCCACCACTCCTCCC | ACT |
| 4247353 | CTGACCTGGCTTCGGGG | ACT |
| 462769 | ACCCCAAGCTCTGCTGG | ACT |
| 3803690 | GAGTACGGGGCTCAGGA | ACT |
| 417414 | CAACATGGTGAAACCCC | ACT |
| 154661 | GTCCAAACCAGGGCTGTCC | ACT |
| 4785704 | ATCAAGACCATCCTGGC | ACG |
| 4785584 | GTTAGCCAGGATGGTCT | ACG |
| 4785585 | CTCCTGACCTCGTGATC | ACG |
| 4785705 | CAGCACTTTGGGAGGCC | ACT |
| 4785586 | CCCAGCACTTTGGGAGG | ACG |
| 4785587 | TGAGCCAGGACGTTCCC | ACT |
| 2016968 | CTCTGTGCTTGCACCCT | ACT |
| 3751693 | GTGTCCTTCTGTTCGTT | ACG |
| 3809646 | CCAAAATCCGAGTGACG | ACT |
| 4785590 | TGCTGAAAACCCTGCCC | ACT |
| 2099105 | CTCAAGTTCTCCCCACC | ACT |
| 4785708 | GAGCAGTGGAGGAGGCC | ACG |
| 4785710 | GGATTCAGACTCAACCC | ACT |
| 4785591 | AGTGGTCATTGTGGGAA | ACG |
| 4785592 | TGGTCATTGTGGGAACG | ACT |
| 4785593 | GGGACAGGGAGAGAAGG | ACG |
| 4785711 | GGGATTACAGGCGTGAG | ACT |
| 4785712 | AGAGTGCATTGAGGCCG | ACT |
| 4785713 | TCATGTTGGCAGTCCCA | ACT |
| 4785714 | GGTGAGAGAATCCGTAT | CGT |
| 4785594 | GAAGTTCCTTTCTGTTCTT | ACT |
| 3803689 | TCAAAGTGTCCTTGGGC | ACT |
| 4785715 | CAAGTGAAAGTCTGGCC | ACG |
| 3764258 | GATTACAGGTGTGAGCA | ACT |
| 4785716 | GACCTACACACATGTGAA | ACT |
| 4785717 | GACACGACCTACACACA | ACG |
| 2077001 | ACGGCCTCACTATGTTG | ACG |
| 2377049 | CTGGTCTTGAACTGACT | ACT |
| 2003522 | TCTTGCTCTGTTGCCCA | ACT |
| 1230 | CGCAAACGCTGAGTGACT | ACG |
| 1800359 | CAATTCTCATGTCCCCCAC | ACT |
| 1061646 | GGTCTGCAACACCAAGAA | ACT |
| 1800358 | CCAGTCCGGGTTGGGTGC | ACG |
| 2286392 | TCAGAACGCCAGGATGC | ACG |
| 2074904 | CCTCCGCTGCCCCAGCC | ACT |
| 2074903 | CCATGAGTGTGGGTAATAA | ACT |

Genetic Analysis 1

[0276] Allelotyping results are shown for female (F) and male (M) cases and controls in Table 13 and Table 14, respectively. Allele frequency is noted in the fourth and fifth columns for melanoma pools and control pools, respectively.

TABLE 13
Females

| | | | | | | | Melanoma |
|---|---|---|---|---|---|---|---|
| dbSNP | Chromsome | | Female | Female | F p- | Odds | Associated |
| rs# | Position | Alleles | Case AF | Control AF | Value | Ratio | Allele |
| 1230 | 89507717 | C/T | C = 0.646 | C = 0.667 | 0.5648 | 1.10 | T |
| | | | T = 0.354 | T = 0.333 | | | |
| 154661 | 89469433 | G/C | G = 0.043 | G = 0.081 | 0.1895 | 1.99 | C |
| | | | C = 0.957 | C = 0.919 | | | |
| 154663 | 89428885 | T/C | T = 0.196 | T = 0.209 | 0.7105 | 1.08 | C |
| | | | C = 0.804 | C = 0.791 | | | |
| 164742 | 89460586 | C/T | C = 0.653 | C = 0.701 | 0.1632 | 1.25 | T |
| | | | T = 0.347 | T = 0.299 | | | |
| 164743 | 89460292 | A/G | A = 0.161 | A = 0.244 | 0.0477 | 1.68 | G |
| | | | G = 0.839 | G = 0.756 | | | |
| 164744 | 89459629 | A/C | A = 0.654 | A = | | | |
| | | | C = 0.346 | C = | | | |
| 164752 | 89425240 | G/A | G = 0.129 | G = 0.057 | 0.0102 | 0.41 | G |
| | | | A = 0.871 | A = 0.943 | | | |
| 164753 | 89430445 | T/C | T = 0.864 | T = 0.832 | 0.2679 | 0.78 | T |
| | | | C = 0.136 | C = 0.168 | | | |
| 166297 | 89434035 | G/A | G = 0.921 | G = 0.909 | 0.6280 | 0.86 | G |
| | | | A = 0.079 | A = 0.091 | | | |
| 171805 | 89436464 | G/A | G = 0.979 | G = 0.954 | 0.2392 | 0.45 | G |
| | | | A = 0.021 | A = 0.046 | | | |
| 187282 | 89461834 | T/C | T = 0.060 | T = 0.034 | 0.2801 | 0.56 | T |
| | | | C = 0.940 | C = 0.966 | | | |
| 187283 | 89432186 | G/A | G = 0.955 | G = 0.973 | 0.4705 | 1.69 | A |
| | | | A = 0.045 | A = 0.027 | | | |
| 258317 | 89435088 | C/T | C = | C = | | | |
| | | | T = | T = | | | |
| 258318 | 89434900 | T/C | T = 0.204 | T = 0.250 | 0.1543 | 1.30 | C |
| | | | C = 0.796 | C = 0.750 | | | |
| 258321 | 89459334 | C/T | C = 0.603 | C = | | | |
| | | | T = 0.397 | T = | | | |
| 258322 | 89458764 | C/T | C = 0.909 | C = 0.952 | 0.1337 | 2.00 | T |
| | | | T = 0.091 | T = 0.048 | | | |
| 258323 | 89457555 | C/G | C = 0.823 | C = 0.779 | 0.2597 | 0.76 | C |
| | | | G = 0.177 | G = 0.221 | | | |
| 258324 | 89457116 | C/A | C = 0.898 | C = 0.891 | 0.8124 | 0.94 | C |
| | | | A = 0.102 | A = 0.109 | | | |
| 258328 | 89433164 | C/T | C = 0.870 | C = 0.906 | 0.3402 | 1.43 | T |
| | | | T = 0.130 | T = 0.094 | | | |
| 258330 | 89432424 | T/G | T = 0.583 | T = 0.626 | 0.2752 | 1.20 | G |
| | | | G = 0.417 | G = 0.374 | | | |
| 258332 | 89430533 | G/A | G = 0.950 | G = 0.941 | 0.6814 | 0.84 | G |
| | | | A = 0.050 | A = 0.059 | | | |
| 258335 | 89423794 | A/G | A = 0.770 | A = 0.753 | 0.6280 | 0.91 | A |
| | | | G = 0.230 | G = 0.247 | | | |
| 258336 | 89423681 | T/G | T = 0.619 | T = 0.556 | 0.1140 | 0.77 | T |
| | | | G = 0.381 | G = 0.444 | | | |
| 258337 | 89423560 | A/T | A = 0.572 | A = 0.643 | 0.0628 | 1.35 | T |
| | | | T = 0.428 | T = 0.357 | | | |
| 397891 | 89455892 | C/G | C = 0.695 | C = | | | |
| | | | G = 0.305 | G = | | | |
| 417323 | 89449127 | T/G | T = 0.635 | T = 0.641 | 0.8812 | 1.03 | G |
| | | | G = 0.365 | G = 0.359 | | | |
| 417414 | 89469010 | A/G | A = | A = 0.232 | | | |
| | | | G = | G = 0.768 | | | |
| 447735 | 89437199 | A/G | A = 0.700 | A = 0.660 | 0.2640 | 0.83 | A |
| | | | G = 0.300 | G = 0.340 | | | |
| 459920 | 89433677 | T/C | T = 0.723 | T = 0.687 | 0.2956 | 0.84 | T |
| | | | C = 0.277 | C = 0.313 | | | |
| 460319 | 89436943 | G/T | G = 0.166 | G = 0.213 | 0.1390 | 1.36 | T |
| | | | T = 0.834 | T = 0.787 | | | |
| 460879 | 89415739 | T/C | T = 0.492 | T = 0.595 | 0.0376 | 1.52 | C |
| | | | C = 0.508 | C = 0.405 | | | |
| 460984 | 89416024 | T/C | T = 0.781 | T = 0.846 | 0.0661 | 1.55 | C |
| | | | C = 0.219 | C = 0.154 | | | |
| 462769 | 89466125 | A/G | A = 0.666 | A = 0.688 | 0.5827 | 1.10 | G |
| | | | G = 0.334 | G = 0.312 | | | |
| 464586 | 89436938 | C/T | C = 0.355 | C = 0.158 | 0.0000 | 0.34 | C |
| | | | T = 0.645 | T = 0.842 | | | |
| 465507 | 89463354 | G/C | G = 0.022 | G = | | | |
| | | | C = 0.978 | C = | | | |
| 467035 | 89443135 | C/G | C = 0.647 | C = 0.632 | 0.6744 | 0.94 | C |
| | | | G = 0.353 | G = 0.368 | | | |
| 467357 | 89420247 | G/A | G = 0.650 | G = 0.660 | 0.7932 | 1.04 | A |
| | | | A = 0.350 | A = 0.340 | | | |
| 604868 | 89439027 | G/A | G = 0.119 | G = 0.116 | 0.9238 | 0.98 | G |
| | | | A = 0.881 | A = 0.884 | | | |
| 1061646 | 89508839 | T/C | T = 0.388 | T = 0.355 | 0.3444 | 0.87 | T |
| | | | C = 0.612 | C = 0.645 | | | |
| 1800358 | 89512181 | C/T | C = 0.199 | C = 0.200 | 0.9836 | 1.00 | T |
| | | | T = 0.801 | T = 0.800 | | | |
| 1800359 | 89508123 | A/G | A = 0.706 | A = 0.776 | 0.0260 | 1.45 | G |
| | | | G = 0.294 | G = 0.224 | | | |
| 1946482 | 89465272 | T/C | T = 0.901 | T = 0.892 | 0.7410 | 0.91 | T |
| | | | C = 0.099 | C = 0.108 | | | |
| 2003522 | 89506148 | C/G | C = 0.388 | C = 0.345 | 0.2567 | 0.83 | C |
| | | | G = 0.612 | G = 0.655 | | | |
| 2010623 | 89431875 | C/T | C = 0.961 | C = 0.978 | 0.4734 | 1.81 | T |
| | | | T = 0.039 | T = 0.022 | | | |
| 2016968 | 89475768 | C/G | C = 0.655 | C = 0.639 | 0.6664 | 0.93 | C |
| | | | G = 0.345 | G = 0.361 | | | |
| 2074903 | 89514525 | A/G | A = 0.922 | A = 0.907 | 0.5732 | 0.83 | A |
| | | | G = 0.078 | G = 0.093 | | | |
| 2074904 | 89514408 | T/C | T = 0.915 | T = 0.919 | 0.8477 | 1.06 | C |
| | | | C = 0.085 | C = 0.081 | | | |
| 2075880 | 89458077 | A/G | A = 0.624 | A = 0.696 | 0.0403 | 1.38 | G |
| | | | G = 0.376 | G = 0.304 | | | |
| 2077001 | 89504952 | C/T | C = 0.412 | C = 0.460 | 0.1898 | 1.22 | T |
| | | | T = 0.588 | T = 0.540 | | | |
| 2081984 | 89436776 | C/T | C = 0.875 | C = 0.870 | 0.8591 | 0.96 | C |
| | | | T = 0.125 | T = 0.130 | | | |
| 2099105 | 89496417 | A/G | A = 0.439 | A = 0.386 | 0.1427 | 0.80 | A |
| | | | G = 0.561 | G = 0.614 | | | |
| 2115401 | 89443459 | C/T | C = 0.661 | C = 0.661 | 0.9999 | 1.00 | C |
| | | | T = 0.339 | T = 0.339 | | | |
| 2118193 | 89442753 | C/T | C = 0.814 | C = | | | |
| | | | T = 0.186 | T = | | | |
| 2162943 | 89463514 | G/A | G = 0.796 | G = 0.834 | 0.2175 | 1.28 | A |
| | | | A = 0.204 | A = 0.166 | | | |
| 2277905 | 89455362 | A/G | A = 0.919 | A = 0.887 | 0.2257 | 0.69 | A |
| | | | G = 0.081 | G = 0.113 | | | |
| 2286392 | 89512411 | C/T | C = 0.266 | C = 0.271 | 0.8865 | 1.02 | T |
| | | | T = 0.734 | T = 0.729 | | | |
| 2377049 | 89505830 | A/C | A = 0.772 | A = 0.793 | 0.5734 | 1.13 | C |
| | | | C = 0.228 | C = 0.207 | | | |
| 2377058 | 89437681 | T/C | T = 0.780 | T = 0.796 | 0.6094 | 1.10 | C |
| | | | C = 0.220 | C = 0.204 | | | |
| 2377233 | 89449752 | C/G | C = 0.891 | C = 0.846 | 0.1471 | 0.67 | C |
| | | | G = 0.109 | G = 0.154 | | | |
| 2434872 | 89419765 | C/G | C = 0.531 | C = 0.547 | 0.6409 | 1.07 | G |
| | | | G = 0.469 | G = 0.453 | | | |
| 2437955 | 89419125 | G/T | G = 0.846 | G = 0.753 | 0.0227 | 0.55 | G |
| | | | T = 0.154 | T = 0.247 | | | |
| 2437956 | 89419101 | G/A | G = 0.754 | G = 0.756 | 0.9642 | 1.01 | A |
| | | | A = 0.246 | A = 0.244 | | | |
| 2437957 | 89418498 | C/T | C = 0.502 | C = 0.509 | 0.8509 | 1.03 | T |
| | | | T = 0.498 | T = 0.491 | | | |
| 3751693 | 89477258 | C/T | C = 0.377 | C = 0.367 | 0.8164 | 0.96 | C |
| | | | T = 0.623 | T = 0.633 | | | |
| 3751700 | 89455055 | G/A | G = 0.977 | G = | | | |
| | | | A = 0.023 | A = | | | |
| 3764258 | 89503876 | C/G | C = 0.904 | C = 0.910 | 0.7881 | 1.08 | G |
| | | | G = 0.096 | G = 0.090 | | | |
| 3794637 | 89456431 | G/A | G = 0.837 | G = | | | |
| | | | A = 0.163 | A = | | | |
| 3794638 | 89456297 | G/T | G = 0.924 | G = 0.902 | 0.5231 | 0.75 | G |
| | | | T = 0.076 | T = 0.098 | | | |
| 3803689 | 89502920 | A/G | A = 0.681 | A = 0.624 | 0.0904 | 0.77 | A |
| | | | G = 0.319 | G = 0.376 | | | |
| 3803690 | 89466221 | C/G | C = 0.669 | C = 0.702 | 0.3623 | 1.17 | G |
| | | | G = 0.331 | G = 0.298 | | | |
| 3809646 | 89489717 | A/G | A = 0.780 | A = 0.746 | 0.3238 | 0.83 | A |
| | | | G = 0.220 | G = 0.254 | | | |
| 3815949 | 89418766 | C/G | C = | C = 0.043 | | | |
| | | | G = | G = 0.957 | | | |
| 4247353 | 89466076 | T/C | T = 0.377 | T = 0.419 | 0.3605 | 1.19 | C |
| | | | C = 0.623 | C = 0.581 | | | |
| 4785584 | 89475246 | C/T | C = 0.875 | C = 0.860 | 0.5770 | 0.88 | C |
| | | | T = 0.125 | T = 0.140 | | | |
| 4785585 | 89475267 | C/T | C = 0.797 | C = 0.801 | 0.8823 | 1.03 | T |
| | | | T = 0.203 | T = 0.199 | | | |
| 4785586 | 89475278 | G/A | G = | G = 0.822 | | | |
| | | | A = | A = 0.178 | | | |
| 4785587 | 89475481 | A/G | A = 0.759 | A = 0.714 | 0.1701 | 0.80 | A |
| | | | G = 0.241 | G = 0.286 | | | |
| 4785590 | 89493029 | G/C | G = 0.657 | G = 0.622 | 0.3664 | 0.86 | G |
| | | | C = 0.343 | C = 0.378 | | | |
| 4785591 | 89500375 | C/T | C = 0.717 | C = 0.756 | 0.2397 | 1.23 | T |
| | | | T = 0.283 | T = 0.244 | | | |
| 4785592 | 89500377 | C/G | C = 0.031 | C = | | | |
| | | | G = 0.969 | G = | | | |
| 4785593 | 89500489 | C/T | C = 0.396 | C = 0.356 | 0.2519 | 0.84 | C |
| | | | T = 0.604 | T = 0.644 | | | |
| 4785594 | 89501378 | C/G | C = 0.708 | C = 0.753 | 0.2422 | 1.26 | G |
| | | | G = 0.292 | G = 0.247 | | | |
| 4785704 | 89475232 | G/A | G = 0.058 | G = 0.056 | 0.8993 | 0.95 | G |
| | | | A = 0.942 | A = 0.944 | | | |
| 4785705 | 89475276 | T/C | T = 0.513 | T = 0.482 | 0.3839 | 0.88 | T |
| | | | C = 0.487 | C = 0.518 | | | |
| 4785708 | 89499431 | C/T | C = 0.691 | C = 0.641 | 0.1476 | 0.80 | C |
| | | | T = 0.309 | T = 0.359 | | | |
| 4785710 | 89499618 | T/C | T = 0.554 | T = 0.599 | 0.2751 | 1.20 | C |
| | | | C = 0.446 | C = 0.401 | | | |
| 4785711 | 89500808 | C/G | C = 0.977 | C = | | | |
| | | | G = 0.023 | G = | | | |
| 4785712 | 89500816 | G/C | G = 0.240 | G = 0.224 | 0.6271 | 0.92 | G |
| | | | C = 0.760 | C = 0.776 | | | |
| 4785713 | 89500960 | G/C | G = 0.582 | G = 0.528 | 0.1411 | 0.80 | G |
| | | | C = 0.418 | C = 0.472 | | | |
| 4785714 | 89501266 | C/A | C = 0.718 | C = 0.631 | 0.0179 | 0.67 | C |
| | | | A = 0.282 | A = 0.369 | | | |
| 4785715 | 89502997 | G/A | G = 0.631 | G = 0.642 | 0.7601 | 1.05 | A |
| | | | A = 0.369 | A = 0.358 | | | |
| 4785716 | 89503989 | T/C | T = 0.860 | T = 0.958 | 0.0001 | 3.74 | C |
| | | | C = 0.140 | C = 0.042 | | | |
| 4785717 | 89503995 | G/A | G = 0.600 | G = 0.571 | 0.4073 | 0.89 | G |
| | | | A = 0.400 | A = 0.429 | | | |

[0277] TABLE 14
Males

| | | | | | | | Melanoma |
|---|---|---|---|---|---|---|---|
| dbSNP | Chromsome | | Male Case | Male | M p- | Odds | Associated |
| rs# | Position | Alleles | AF | Control AF | Value | Ratio | Allele |
| 1230 | 89507717 | C/T | C = 0.663 | C = 0.672 | 0.798 | 1.04 | T |
| | | | T = 0.337 | T = 0.328 | | | |
| 154661 | 89469433 | G/C | G = 0.024 | G = | | | |
| | | | C = 0.976 | C = | | | |
| 154663 | 89428885 | T/C | T = 0.173 | T = 0.207 | 0.316 | 1.25 | C |
| | | | C = 0.827 | C = 0.793 | | | |
| 164742 | 89460586 | C/T | C = 0.678 | C = 0.760 | 0.024 | 1.50 | T |
| | | | T = 0.322 | T = 0.240 | | | |
| 164743 | 89460292 | A/G | A = 0.052 | A = | | | |
| | | | G = 0.948 | G = | | | |
| 164744 | 89459629 | A/C | A = 0.715 | A = 0.574 | 0.001 | 0.54 | A |
| | | | C = 0.285 | C = 0.426 | | | |
| 164752 | 89425240 | G/A | G = 0.102 | G = 0.054 | 0.069 | 0.51 | G |
| | | | A = 0.898 | A = 0.946 | | | |
| 164753 | 89430445 | T/C | T = 0.903 | T = 0.808 | 0.001 | 0.45 | T |
| | | | C = 0.097 | C = 0.192 | | | |
| 166297 | 89434035 | G/A | G = 0.945 | G = 0.916 | 0.243 | 0.64 | G |
| | | | A = 0.055 | A = 0.084 | | | |
| 171805 | 89436464 | G/A | G = | G = 0.964 | | | |
| | | | A = | A = 0.036 | | | |
| 187282 | 89461834 | T/C | T = 0.066 | T = 0.047 | 0.626 | 0.69 | T |
| | | | C = 0.934 | C = 0.953 | | | |
| 187283 | 89432186 | G/A | G = 0.967 | G = 0.971 | 0.904 | 1.13 | A |
| | | | A = 0.033 | A = 0.029 | | | |
| 258317 | 89435088 | C/T | C = 0.975 | C = 0.979 | 0.865 | 1.17 | T |
| | | | T = 0.025 | T = 0.021 | | | |
| 258318 | 89434900 | T/C | T = 0.150 | T = 0.223 | 0.041 | 1.63 | C |
| | | | C = 0.850 | C = 0.777 | | | |
| 258321 | 89459334 | C/T | C = 0.607 | C = 0.735 | 0.005 | 1.80 | T |
| | | | T = 0.393 | T = 0.265 | | | |
| 258322 | 89458764 | C/T | C = 0.909 | C = 0.956 | 0.040 | 2.17 | T |
| | | | T = 0.091 | T = 0.044 | | | |
| 258323 | 89457555 | C/G | C = 0.817 | C = 0.785 | 0.344 | 0.82 | C |
| | | | G = 0.183 | G = 0.215 | | | |
| 258324 | 89457116 | C/A | C = 0.916 | C = 0.894 | 0.406 | 0.77 | C |
| | | | A = 0.084 | A = 0.106 | | | |
| 258328 | 89433164 | C/T | C = 0.855 | C = 0.782 | 0.062 | 0.61 | C |
| | | | T = 0.145 | T = 0.218 | | | |
| 258330 | 89432424 | T/G | T = 0.633 | T = 0.607 | 0.482 | 0.89 | T |
| | | | G = 0.367 | G = 0.393 | | | |
| 258332 | 89430533 | G/A | G = 0.952 | G = 0.933 | 0.383 | 0.70 | G |
| | | | A = 0.048 | A = 0.067 | | | |
| 258335 | 89423794 | A/G | A = 0.778 | A = 0.792 | 0.726 | 1.09 | G |
| | | | G = 0.222 | G = 0.208 | | | |
| 258336 | 89423681 | T/G | T = 0.588 | T = 0.522 | 0.091 | 0.76 | T |
| | | | G = 0.412 | G = 0.478 | | | |
| 258337 | 89423560 | A/T | A = 0.577 | A = 0.654 | 0.041 | 1.38 | T |
| | | | T = 0.423 | T = 0.346 | | | |
| 397891 | 89455892 | C/G | C = 0.608 | C = | | | |
| | | | G = 0.392 | G = | | | |
| 417323 | 89449127 | T/G | T = 0.625 | T = 0.664 | 0.461 | 1.18 | G |
| | | | G = 0.375 | G = 0.336 | | | |
| 417414 | 89469010 | A/G | A = 0.075 | A = 0.222 | 0.000 | 3.51 | G |
| | | | G = 0.925 | G = 0.778 | | | |
| 447735 | 89437199 | A/G | A = 0.687 | A = 0.654 | 0.359 | 0.86 | A |
| | | | G = 0.313 | G = 0.346 | | | |
| 459920 | 89433677 | T/C | T = 0.719 | T = 0.687 | 0.358 | 0.86 | T |
| | | | C = 0.281 | C = 0.313 | | | |
| 460319 | 89436943 | G/T | G = 0.156 | G = 0.230 | 0.020 | 1.62 | T |
| | | | T = 0.844 | T = 0.770 | | | |
| 460879 | 89415739 | T/C | T = 0.532 | T = | | | |
| | | | C = 0.468 | C = | | | |
| 460984 | 89416024 | T/C | T = 0.794 | T = | | | |
| | | | C = 0.206 | C = | | | |
| 462769 | 89466125 | A/G | A = 0.664 | A = 0.720 | 0.131 | 1.30 | G |
| | | | G = 0.336 | G = 0.280 | | | |
| 464586 | 89436938 | C/T | C = 0.305 | C = 0.133 | 0.000 | 0.35 | C |
| | | | T = 0.695 | T = 0.867 | | | |
| 465507 | 89463354 | G/C | G = 0.033 | G = | | | |
| | | | C = 0.967 | C = | | | |
| 467035 | 89443135 | C/G | C = 0.662 | C = 0.621 | 0.287 | 0.83 | C |
| | | | G = 0.338 | G = 0.379 | | | |
| 467357 | 89420247 | G/A | G = 0.654 | G = 0.650 | 0.913 | 0.98 | G |
| | | | A = 0.346 | A = 0.350 | | | |
| 604868 | 89439027 | G/A | G = 0.103 | 6 = 0.109 | 0.818 | 1.06 | A |
| | | | A = 0.897 | A = 0.891 | | | |
| 1061646 | 89508839 | T/C | T = 0.376 | T = 0.322 | 0.241 | 0.79 | T |
| | | | C = 0.624 | C = 0.678 | | | |
| 1800358 | 89512181 | C/T | C = 0.205 | C = 0.177 | 0.357 | 0.83 | C |
| | | | T = 0.795 | T = 0.823 | | | |
| 1800359 | 89508123 | A/G | A = 0.756 | A = 0.806 | 0.120 | 1.34 | G |
| | | | G = 0.244 | G = 0.194 | | | |
| 1946482 | 89465272 | T/C | T = 0.896 | T = 0.878 | 0.556 | 0.84 | T |
| | | | C = 0.104 | C = 0.122 | | | |
| 2003522 | 89506148 | C/G | C = 0.355 | C = 0.316 | 0.339 | 0.84 | C |
| | | | G = 0.645 | G = 0.684 | | | |
| 2010623 | 89431875 | C/T | C = 0.971 | C = 0.952 | 0.535 | 0.59 | C |
| | | | T = 0.029 | T = 0.048 | | | |
| 2016968 | 89475768 | C/G | C = 0.668 | C = 0.635 | 0.424 | 0.87 | C |
| | | | G = 0.332 | G = 0.365 | | | |
| 2074903 | 89514525 | A/G | A = 0.915 | A = 0.914 | 0.964 | 0.99 | A |
| | | | G = 0.085 | G = 0.086 | | | |
| 2074904 | 89514408 | T/C | T = 0.932 | T = 0.920 | 0.606 | 0.84 | T |
| | | | C = 0.068 | C = 0.080 | | | |
| 2075880 | 89458077 | A/G | A = 0.597 | A = 0.707 | 0.004 | 1.63 | G |
| | | | G = 0.403 | G = 0.293 | | | |
| 2077001 | 89504952 | C/T | C = 0.461 | C = 0.475 | 0.721 | 1.06 | T |
| | | | T = 0.539 | T = 0.525 | | | |
| 2081984 | 89436776 | C/T | C = 0.860 | C = 0.846 | 0.614 | 0.89 | C |
| | | | T = 0.140 | T = 0.154 | | | |
| 2099105 | 89496417 | A/G | A = 0.421 | A = 0.366 | 0.139 | 0.79 | A |
| | | | G = 0.579 | G = 0.634 | | | |
| 2115401 | 89443459 | C/T | C = 0.673 | C = 0.652 | 0.592 | 0.91 | C |
| | | | T = 0.327 | T = 0.348 | | | |
| 2118193 | 89442753 | C/T | C = | C = | | | |
| | | | T = | T = | | | |
| 2162943 | 89463514 | G/A | G = 0.823 | G = 0.798 | 0.498 | 0.85 | G |
| | | | A = 0.177 | A = 0.202 | | | |
| 2277905 | 89455362 | A/G | A = 0.956 | A = 0.937 | 0.468 | 0.68 | A |
| | | | G = 0.044 | G = 0.063 | | | |
| 2286392 | 89512411 | C/T | C = 0.269 | C = 0.287 | 0.616 | 1.09 | T |
| | | | T = 0.731 | T = 0.713 | | | |
| 2377049 | 89505830 | A/C | A = 0.777 | A = 0.800 | 0.498 | 1.15 | C |
| | | | C = 0.223 | C = 0.200 | | | |
| 2377058 | 89437681 | T/C | T = 0.840 | T = 0.840 | 0.987 | 1.00 | T |
| | | | C = 0.160 | C = 0.160 | | | |
| 2377233 | 89449752 | C/G | C = 0.899 | C = 0.833 | 0.056 | 0.56 | C |
| | | | G = 0.101 | G = 0.167 | | | |
| 2434872 | 89419765 | C/G | C = 0.544 | C = 0.586 | 0.373 | 1.18 | G |
| | | | G = 0.456 | G = 0.414 | | | |
| 2437955 | 89419125 | G/T | G = 0.887 | G = 0.826 | 0.057 | 0.60 | G |
| | | | T = 0.113 | T = 0.174 | | | |
| 2437956 | 89419101 | G/A | G = 0.781 | G = 0.724 | 0.109 | 0.74 | G |
| | | | A = 0.219 | A = 0.276 | | | |
| 2437957 | 89418498 | C/T | C = 0.542 | C = 0.512 | 0.449 | 0.89 | C |
| | | | T = 0.458 | T = 0.488 | | | |
| 3751693 | 89477258 | C/T | C = 0.390 | C = 0.382 | 0.853 | 0.97 | C |
| | | | T = 0.610 | T = 0.618 | | | |
| 3751700 | 89455055 | G/A | G = | G = 0.941 | | | |
| | | | A = | A = 0.059 | | | |
| 3764258 | 89503876 | C/G | C = 0.918 | C = 0.913 | 0.843 | 0.94 | C |
| | | | G = 0.082 | G = 0.087 | | | |
| 3794637 | 89456431 | G/A | G = 0.874 | G = 0.833 | 0.227 | 0.72 | G |
| | | | A = 0.126 | A = 0.167 | | | |
| 3794638 | 89456297 | G/T | G = | G = 0.944 | | | |
| | | | T = | T = 0.056 | | | |
| 3803689 | 89502920 | A/G | A = 0.638 | A = 0.614 | 0.549 | 0.91 | A |
| | | | G = 0.362 | G = 0.386 | | | |
| 3803690 | 89466221 | C/G | C = 0.687 | C = 0.691 | 0.936 | 1.02 | G |
| | | | G = 0.313 | G = 0.309 | | | |
| 3809646 | 89489717 | A/G | A = 0.786 | A = 0.739 | 0.227 | 0.77 | A |
| | | | G = 0.214 | G = 0.261 | | | |
| 3815949 | 89418766 | C/G | C = | C = | | | |
| | | | G = | G = | | | |
| 4247353 | 89466076 | T/C | T = | T = 0.423 | | | |
| | | | C = | C = 0.577 | | | |
| 4785584 | 89475246 | C/T | C = 0.894 | C = 0.869 | 0.336 | 0.78 | C |
| | | | T = 0.106 | T = 0.131 | | | |
| 4785585 | 89475267 | C/T | C = 0.810 | C = 0.811 | 0.977 | 1.01 | T |
| | | | T = 0.190 | T = 0.189 | | | |
| 4785586 | 89475278 | G/A | G = 0.804 | G = 0.852 | 0.190 | 1.41 | A |
| | | | A = 0.196 | A = 0.148 | | | |
| 4785587 | 89475481 | A/G | A = 0.743 | A = 0.690 | 0.126 | 0.77 | A |
| | | | G = 0.257 | G = 0.310 | | | |
| 4785590 | 89493029 | G/C | G = 0.643 | G = 0.606 | 0.315 | 0.85 | G |
| | | | C = 0.357 | C = 0.394 | | | |
| 4785591 | 89500375 | C/T | C = 0.767 | C = 0.769 | 0.959 | 1.01 | T |
| | | | T = 0.233 | T = 0.231 | | | |
| 4785592 | 89500377 | C/G | C = | C = | | | |
| | | | G = | G = | | | |
| 4785593 | 89500489 | C/T | C = 0.381 | C = 0.341 | 0.256 | 0.84 | C |
| | | | T = 0.619 | T = 0.659 | | | |
| 4785594 | 89501378 | C/G | C = 0.729 | C = 0.753 | 0.521 | 1.13 | G |
| | | | G = 0.271 | G = 0.247 | | | |
| 4785704 | 89475232 | G/A | G = 0.049 | G = 0.045 | 0.855 | 0.92 | G |
| | | | A = 0.951 | A = 0.955 | | | |
| 4785705 | 89475276 | T/C | T = 0.500 | T = 0.481 | 0.621 | 0.93 | T |
| | | | C = 0.500 | C = 0.519 | | | |
| 4785708 | 89499431 | C/T | C = 0.675 | C = 0.601 | 0.037 | 0.73 | C |
| | | | T = 0.325 | T = 0.399 | | | |
| 4785710 | 89499618 | T/C | T = 0.572 | T = 0.621 | 0.202 | 1.22 | C |
| | | | C = 0.428 | C = 0.379 | | | |
| 4785711 | 89500808 | C/G | C = | C = | | | |
| | | | G = | G = | | | |
| 4785712 | 89500816 | G/C | G = 0.233 | G = 0.186 | 0.164 | 0.76 | G |
| | | | C = 0.767 | C = 0.814 | | | |
| 4785713 | 89500960 | G/C | G = 0.548 | G = 0.484 | 0.080 | 0.77 | G |
| | | | C = 0.452 | C = 0.516 | | | |
| 4785714 | 89501266 | C/A | C = 0.659 | C = 0.599 | 0.093 | 0.77 | C |
| | | | A = 0.341 | A = 0.401 | | | |
| 4785715 | 89502997 | G/A | G = 0.642 | G = 0.658 | 0.649 | 1.07 | A |
| | | | A = 0.358 | A = 0.342 | | | |
| 4785716 | 89503989 | T/C | T = 0.903 | T = | | | |
| | | | C = 0.097 | C = | | | |
| 4785717 | 89503995 | G/A | G = 0.600 | G = 0.539 | 0.095 | 0.78 | G |
| | | | A = 0.400 | A = 0.461 | | | |

[0278] Allelotyping results were considered significant with a calculated p-value of less than or equal to 0.05 for allelotype results. These values are indicated in bold. The assay failed for those SNPs in which the allele frequency is blank. The combined allelotyping p-values for males and females were plotted in FIG. 12 and separately for females and males in FIGS. 13 and 14, respectively. The position of each SNP on the chromosome is presented on the x-axis. The y-axis gives the negative logarithm (base 10) of the p-value comparing the estimated allele in the case group to that of the control group. The minor allele frequency of the control group for each SNP designated by an X or other symbol on the graphs in FIGS. 12, 13 and 14 can be determined by consulting Table 13 or 14. By proceeding down the Table from top to bottom and across the graphs from left to right the allele frequency associated with each symbol shown can be determined.

[0279] To aid the interpretation, multiple lines have been added to the graph. The broken horizontal lines are drawn at two common significance levels, 0.05 and 0.01. The vertical broken lines are drawn every 20 kb to assist in the interpretation of distances between SNPs. Two other lines are drawn to expose linear trends in the association of SNPs to the disease. The light gray line (or generally bottom-most curve) is a nonlinear smoother through the data points on the graph using a local polynomial regression method (W. S. Cleveland, E. Grosse and W. M. Shyu (1992) Local regression models. Chapter 8 of Statistical Models in S eds J. M. Chambers and T. J. Hastie, Wadsworth & Brooks/Cole.). The black line (or generally top-most curve, e.g., see peak in left-most graph just to the left of position 92150000) provides a local test for excess statistical significance to identify regions of association. This was created by use of a 10 kb sliding window with 1 kb step sizes. Within each window, a chi-square goodness of fit test was applied to compare the proportion of SNPs that were significant at a test wise level of 0.01, to the proportion that would be expected by chance alone (0.05 for the methods used here). Resulting p-values that were less than 10⁻⁸ were truncated at that value.

[0280] Finally, the exons and introns of the genes in the covered region are plotted below each graph at the appropriate chromosomal positions. The gene boundary is indicated by the broken horizontal line. The exon positions are shown as thick, unbroken bars. An arrow is place at the 3′ end of each gene to show the direction of transcription.

### Example 6

PCLO Proximal SNPs

[0281] It has been discovered that a polymorphic variation (rs1044639) in the untranslated region of a gene encoding presynaptic cytomatrix protein (PCLO) is associated with the occurrence of melanoma. See Table 3. Subsequently, sixty allelic variants located within or nearby the target gene were identified and subsequently allelotyped in melanoma case and control sample sets as described in Examples 1 and 2. The polymorphic variants are set forth in Table 15. The chromosome position provided in column four of Table 15 is based on Genome “Build 33” of NCBI's GenBank.

TABLE 15

| | | | | | Allele | |
|---|---|---|---|---|---|---|
| dbSNP | | Position in | Chromosome | Allele | Present | IUPAC |
| rs# | Chromosome | | Position | Variants | in FIG. 2 | Code |
| 2158220 | 7 | 118 | 82009218 | T/C | T | Y |
| 1024465 | 7 | 1263 | 82010363 | G/A | A | R |
| 4732483 | 7 | 5696 | 82014796 | T/C | C | Y |
| 4732485 | 7 | 8775 | 82017875 | C/T | T | Y |
| 1859176 | 7 | 17207 | 82026307 | C/T | C | Y |
| 1859177 | 7 | 17344 | 82026444 | C/T | C | Y |
| 2074401 | 7 | 18735 | 82027835 | A/G | A | R |
| 4299948 | 7 | 19057 | 82028157 | T/G | G | K |
| 4348435 | 7 | 20800 | 82029900 | G/A | A | R |
| 4348436 | 7 | 20821 | 82029921 | G/C | C | S |
| 4413718 | 7 | 20964 | 82030064 | G/C | G | S |
| 985199 | 7 | 21045 | 82030145 | G/A | G | R |
| 2522830 | 7 | 32252 | 82041352 | G/A | G | R |
| 2214414 | 7 | 33261 | 82042361 | T/C | C | Y |
| 2051791 | 7 | 33887 | 82042987 | C/T | T | Y |
| 2214415 | 7 | 34631 | 82043731 | G/A | A | R |
| 2189247 | 7 | 36394 | 82045494 | C/A | C | M |
| 2522831 | 7 | 37249 | 82046349 | T/C | T | Y |
| 2715147 | 7 | 37554 | 82046654 | T/C | C | Y |
| 2715148 | 7 | 39184 | 82048284 | A/C | A | M |
| 2522832 | 7 | 39513 | 82048613 | A/G | A | R |
| 1044639 | 7 | 40707 | 82049807 | G/T | T | K |
| 2715149 | 7 | 41961 | 82051061 | A/T | A | W |
| 2522833 | 7 | 42857 | 82051957 | C/A | A | M |
| 2247523 | 7 | 43553 | 82052653 | C/G | C | S |
| 2371214 | 7 | 43821 | 82052921 | T/C | T | Y |
| 2189248 | 7 | 44454 | 82053554 | T/C | T | Y |
| 2715150 | 7 | 45044 | 82054144 | A/G | A | R |
| 2715151 | 7 | 45812 | 82054912 | C/G | C | S |
| 2371215 | 7 | 46643 | 82055743 | T/A | T | W |
| 2715152 | 7 | 46815 | 82055915 | G/A | G | R |
| 2715153 | 7 | 47007 | 82056107 | T/C | C | Y |
| 972346 | 7 | 49684 | 82058784 | C/T | C | Y |
| 2715154 | 7 | 50015 | 82059115 | G/T | G | K |
| 2522834 | 7 | 50095 | 82059195 | T/C | C | Y |
| 2023847 | 7 | 50442 | 82059542 | G/T | T | K |
| 2715155 | 7 | 51203 | 82060303 | A/G | A | R |
| 2715156 | 7 | 51983 | 82061083 | A/G | G | R |
| 2301722 | 7 | 54383 | 82063483 | A/C | A | M |
| 2257207 | 7 | 57333 | 82066433 | A/T | A | W |
| 2715157 | 7 | 57523 | 82066623 | A/G | A | R |
| 2715158 | 7 | 58755 | 82067855 | G/C | G | S |
| 2715159 | 7 | 60557 | 82069657 | A/G | A | R |
| 2522835 | 7 | 60645 | 82069745 | A/T | T | W |
| 2522836 | 7 | 62202 | 82071302 | C/A | C | M |
| 2522837 | 7 | 64531 | 82073631 | A/G | A | R |
| 2522838 | 7 | 64706 | 82073806 | A/T | T | W |
| 2522839 | 7 | 66797 | 82075897 | G/A | A | R |
| 2522840 | 7 | 67564 | 82076664 | G/T | T | K |
| 2522842 | 7 | 68811 | 82077911 | G/T | G | K |
| 2522843 | 7 | 68871 | 82077971 | C/A | C | M |
| 2522844 | 7 | 69241 | 82078341 | T/C | C | Y |
| 2522845 | 7 | 71058 | 82080158 | T/G | T | K |
| 2715161 | 7 | 71430 | 82080530 | C/T | C | Y |
| 4377905 | 7 | 83460 | 82092560 | A/G | A | R |
| 4579453 | 7 | 83870 | 82092970 | T/C | T | Y |
| 4260846 | 7 | 83985 | 82093085 | C/A | C | M |
| 1986481 | 7 | 85832 | 82094932 | A/T | A | W |
| 4628206 | 7 | 86492 | 82095592 | A/T | T | W |
| 2888017 | 7 | 89352 | 82098452 | A/G | G | R |

Assay for Verifying and Allelotyping SNPs

[0282] The methods used to verify and allelotype the sixty proximal SNPs of Table 15 are the same methods described in Examples 1 and 2 herein. The primers and probes used in these assays are provided in Table 16 and Table 17, respectively.

TABLE 16

| | | |
|---|---|---|
| dbSNP | Forward | Reverse |
| rs# | PCR primer | PCR primer |

| | | |
|---|---|---|
| 2158220 | ACGTTGGATGCCACAGCCCTTATTACAGTC | ACGTTGGATGGGGCAGGAGAGAGATTCTAT |
| 1024465 | GGCGCACGCCTCCACGCAAGCAAAACTCTTC | GGCGCACGCCAGAGATTGTGTTAAGGCATC |
| | TAAAG | |
| 4732483 | ACGTTGGATGCCCACCAAGACTGTAAAAGC | ACGTTGGATGCAGGAAACAACAGATGCTGG |
| 4732485 | ACGTTGGATGAGGGAGTAGTGCAAGATAGG | ACGTTGGATGAAGTTCTTCCTGACAGCTTC |
| 1859176 | ACGTTGGATGGGACAAGTTGTTTTTCACTG | ACGTTGGATGGCTTATAGTGATTCATGCCC |
| 1859177 | ACGTTGGATGGATTAGTTATTGAGCAGAGGG | ACGTTGGATGCTACCAAAAGGGCACTTGAC |
| 2074401 | ACGTTGGATGGGTTTAGGTTTCAATTCTGG | ACGTTGGATGCCAGCATTTGTCAGATGAGG |
| 4299948 | ACGTTGGATGGAGGGAGACTCCATCTCAAA | ACGTTGGATGGAGAGAGGTTGGAATGACAC |
| 4348435 | ACGTTGGATGAAGGGTTAACAGAGTGCCTG | ACGTTGGATGCTAAGGCTACTACGAGCATG |
| 4348436 | ACGTTGGATGAAGGGTTAACAGAGTGCCTG | ACGTTGGATGTTTTGGTTGAATTCTAAGGC |
| 4413718 | ACGTTGGATGGAGGACTGTAAGCTTAGAATG | ACGTTGGATGTGTAGCTTTTTCTCTAGCCG |
| 985199 | ACGTTGGATGGAGAAAAAGCTACATGGCAC | ACGTTGGATGTTCCATCTTTTTAGAACGCC |
| 2522830 | ACGTTGGATGTGTATGTAAAAATGATGACC | ACGTTGGATGAATGCCAAAAGGATATTTGC |
| 2214414 | ACGTTGGATGAAAACTCCACTGTACACTCG | ACGTTGGATGTTTCAGGGATCTGCAAGGTC |
| 2051791 | ACGTTGGATGCAACTACCTAATTCAAATGTC | ACGTTGGATGGTCATTGGCAATGAGGATGC |
| 2214415 | ACGTTGGATGTCTTCCCCCAGATCATGTTG | ACGTTGGATGTTCCACTTTTCATCCACATG |
| 2189247 | ACGTTGGATGGAAGCATTCCTAAAACCTTG | ACGTTGGATGTCAAACAAAAATAGCTCAGG |
| 2522831 | ACGTTGGATGTGCTCACGCATAAAACAGGG | ACGTTGGATGGTACAGAGTGTTTTGTCATCC |
| 2715147 | ACGTTGGATGCTAGTTTTTCTCTCTGCACTT | ACGTTGGATGGATCCATGTATATTTCCAGGC |
| 2715148 | GGCGCACGCCTCCACGCAAGAGAGAACTTTC | TACCAGTTGGAATGTGGATC |
| | ACCATG | |
| 2522832 | GGCGCACGCCTCCACGAGCACACAGCAAGAA | GGCGCACGCCAATGCCATGCCCACAAAAGC |
| | CATCC | |
| 1044639 | ACGTTGGATGCGCAAACAAAAAGGACACAC | ACGTTGGATGCTCCTTTGTTTCCACCATCC |
| 2715149 | ACGTTGGATGGTTCAGTATATCTAGGTAAGG | ACGTTGGATGAAACTGAGCTACTGCCTCTG |
| 2522833 | GGCGCACGCCTCCACGTTCCTTGGTTTATATC | TACCACCTTGGAGTGTTATC |
| | CTTG | |
| 2247523 | ACGTTGGATGGGTAGTCATATCCCTATTTC | ACGTTGGATGGGGACAAAATGGAAAAGAATG |
| 2371214 | ACGTTGGATGGAAGGACTTCAGTAAGTCAC | ACGTTGGATGTTGATCCTAGGCAGGAGTAC |
| 2189248 | ACGTTGGATGAGATTAAAAATCACAAGATC | ACGTTGGATGTACACTTACTATGTACTTGT |
| 2715150 | ACGTTGGATGACACTGGAGGTGACAGTTTG | ACGTTGGATGACCATAGCAGCAAATAAGGG |
| 2715151 | ACGTTGGATGGGCATTGTGGTGCTAATCTC | ACGTTGGATGTAATTTTTGCCTACAGTTAC |
| 2371215 | ACGTTGGATGTAGAACACCTACAAGCATTTC | ACGTTGGATGTAAGTTGAATGCACAGTGAC |
| 2715152 | ACGTTGGATGGCCCCATAAACAATAATTTGG | ACGTTGGATGCATCTTTTTCTCAGTACACTC |
| 2715153 | ACGTTGGATGATAAATTTTTGGTTTATGTC | ACGTTGGATGAATGCAGATGTCCCAAGTTC |
| 972346 | ACGTTGGATGCCTATGTTTGGATCCTGGTC | ACGTTGGATGGGTGAGAAAACTTGAAGCTC |
| 2715154 | ACGTTGGATGCATCGTGAACAAGTTAGGCC | ACGTTGGATGGCGTAATTGTTCCACAACAC |
| 2522834 | ACGTTGGATGTGGCCAGATACATTTAGAAA | ACGTTGGATGTGGAGAATCAAACTCATTAC |
| 2023847 | ACGTTGGATGCAAAATCTGTGGAGTTGAAGG | ACGTTGGATGCAGCCTGACTTTATGCTCAC |
| 2715155 | ACGTTGGATGGTTTAGTAAAGGAAAACCAG | ACGTTGGATGGAAGGCTTCTTTGGTGTATC |
| 2715156 | ACGTTGGATGATAAGAGTCCTGTTAGCTAG | ACGTTGGATGATTGATCAGAGGGTGGGAAG |
| 2301722 | ACGTTGGATGTTCCAAGGCCTTTGCTTGTC | ACGTTGGATGAGGCAGCTAATAAGCTACCC |
| 2257207 | ACGTTGGATGGCTGTCAGCACTGAAATGTA | ACGTTGGATGGTACCGAAAGGTATCTATAGG |
| 2715157 | ACGTTGGATGGAAGAAAAAAATGCTTAACTC | ACGTTGGATGGCACAATTGTGGCTGAATAC |
| 2715158 | ACGTTGGATGAGGTCATCAGGGTAGTACTG | ACGTTGGATGAAGCAGAAGTGGAGTGTGAG |
| 2715159 | ACGTTGGATGAGTAGCATAATTCCTCTGGC | ACGTTGGATGCCACAAAAGACCCTAATAGC |
| 2522835 | ACGTTGGATGAGCCAGAGGAATTATGCTAC | ACGTTGGATGCCATTCCATATGTCTGTCTG |
| 2522836 | ACGTTGGATGTCACTTGAATATGGGAGGCG | ACGTTGGATGACAGAGTCTCACTCTGTCCC |
| 2522837 | ACGTTGGATGCATGATGAGATAGATTTAAC | ACGTTGGATGAAACATAGGAAAAAGTGATG |
| 2522838 | ACGTTGGATGCTAAAAAGAATCAAGTACGC | ACGTTGGATGCCTGTGAAAGTAATGCTTGG |
| 2522839 | ACGTTGGATGCCACAATTATGTTGTTGAACC | ACGTTGGATGTACACCACTGCACTCCAGTC |
| 2522840 | ACGTTGGATGGGAGGAAGAGTACATTAATA | ACGTTGGATGTGTGCTCCTGCAGAAATGTG |
| 2522842 | ACGTTGGATGCCATGCCTGGCCTTTAATAG | ACGTTGGATGAATCCTATCATCGATGCTAC |
| 2522843 | ACGTTGGATGTACTAAGTTCTTGAATTACC | ACGTTGGATGTCGATGATAGGATTTGTTGC |
| 2522844 | ACGTTGGATGTGGTAGGCACTACACAATTC | ACGTTGGATGCCAATTGTTTTCTAGTAGACT |
| 2522845 | ACGTTGGATGAAACCAGTAGTGGATCAGCC | ACGTTGGATGATGTACACCAGTGGTTTGCC |
| 2715161 | ACGTTGGATGAACAGGGCTGGAATTGGAGG | ACGTTGGATGTAGCTCCTACATATGGAGTG |
| 4377905 | ACGTTGGATGTATGGCTGTATCAATATCAC | ACGTTGGATGAATGCAAACTGTCTAAGCAC |
| 4579453 | ACGTTGGATGGACTGTAATCCCAGCTACTC | ACGTTGGATGTCTCAGCTCACTGCACTGTC |
| 4260846 | ACGTTGGATGGGAAATATACCATATAAATG | ACGTTGGATGAGAGCAAGATGCCGTCTCAG |
| 1986481 | ACGTTGGATGAGTACCCAGGTGTTCTTAGC | ACGTTGGATGAAGCATGACATTATGTTTCC |
| 4628206 | ACGTTGGATGCTTCACAGAAGAGAGTTTCC | ACGTTGGATGGCGTTAGGTACACATGACAC |
| 2888017 | ACGTTGGATGCATCTCCTTGCCAGCATCTC | ACGTTGGATGCACTAGTCATCAGGGAAATC |

[0283] TABLE 17

| | | |
|---|---|---|
| dbSNP | Extend | Term |
| rs# | Probe | Mix |

| | | |
|---|---|---|
| 2158220 | CTGAGGCCTGCCCCTGA | ACT |
| 1024465 | TTAAGGCATCTCTGTATATACTAA | ACG |
| 4732483 | CAGATGCTGGAGAGGAT | ACT |
| 4732485 | GACAGCTTCAGATATTTCA | ACG |
| 1859176 | CATGCCCAATTCATATAGATA | ACG |
| 1859177 | TCTGTCTTGTTCCCATC | ACG |
| 2074401 | CAGATGAGGTTTCTGAAG | ACT |
| 4299948 | AAGGACTATAGGGCTACTA | ACT |
| 4348435 | CATGCCTACCTGTTAATATG | ACG |
| 4348436 | GAATTCTAAGGCTACTACGA | ACT |
| 4413718 | AAGAAGTGGTCTACTGTC | ACT |
| 985199 | GAACGCCTTATCTAAGCA | ACG |
| 2522830 | AGGATATTTGCAAACGTG | ACG |
| 2214414 | TGCAAGGTCAAAATATTCTT | ACT |
| 2051791 | GATGCTTTAAAACAAAAACTACA | ACG |
| 2214415 | CCATAATATTTCACCCATTCT | ACG |
| 2189247 | AAAATAGCTCAGGTTTTTCA | CGT |
| 2522831 | ACATTAAGTGGATGAGGT | ACT |
| 2715147 | TATTTCCAGGCACTTCA | ACT |
| 2715148 | GAATGTGGATCAGTGTTT | ACT |
| 2522832 | AGACAATCTCTAAAAATTAA | ACT |
| 1044639 | CATCCATCCAACCTGGCTC | CGT |
| 2715149 | CCTCTGTGGGATAAAACA | CGT |
| 2522833 | GAGTGTTATCGAGGTGAG | CGT |
| 2247523 | TGAGTAAGTTGCAATTACAAA | ACT |
| 2371214 | CAGGAGTACTCTAGATTAGT | ACT |
| 2189248 | CAAATAATCATGAAATTGGTAGC | ACT |
| 2715150 | AAATAAGGGAAAGGAAGTC | ACT |
| 2715151 | TTGCCTACAGTTACTTATCT | ACT |
| 2371215 | GTAGTTTTCTTTGCCCT | CGT |
| 2715152 | CAATGTTTTAGTTTTGCTTTTC | ACG |
| 2715153 | TTTGGTTCATCAATTGTAAAATA | ACT |
| 972346 | GAAGCTCAGAAAAATTAAGG | ACG |
| 2715154 | TTCCACAACACTCACTT | CGT |
| 2522834 | CATTTTAACTTTTGTCCAATCA | ACT |
| 2023847 | TAAGAATCCCCCTGTTT | CGT |
| 2715155 | GGTGTATCTACTTTCATAAAATT | ACT |
| 2715156 | AGGGTGGGAAGAAAAAA | ACT |
| 2301722 | GGTCTTTCTTTTAATCACAC | ACT |
| 2257207 | CGAAAGGTATCTATAGGTTTAATA | CGT |
| 2715157 | AACAAATATTTGAGAAAACTGC | ACT |
| 2715158 | TGTGCAGAAGGTTGACA | ACT |
| 2715159 | CCTAATAGCCAAAGCAATTTT | ACT |
| 2522835 | CATATGTCTGTCTGCTTTTA | CGT |
| 2522836 | CAGTGGTGTGATCTCTG | CGT |
| 2522837 | CAATGGATTTAACAAATTTGTAG | ACT |
| 2522838 | ATGCTTGGAGCCATTTC | CGT |
| 2522839 | GACAGAGTGGGACCTGT | ACG |
| 2522840 | TGCAGAAATGTGACAATG | CGT |
| 2522842 | GATGCTACATATTCAGCAAAA | CGT |
| 2522843 | CAAAGTCTTTTGCTTAATAGG | CGT |
| 2522844 | ACACCATAAAATGTTAGACATAA | ACT |
| 2522845 | CTGCTGGCTTCCTACTT | ACT |
| 2715161 | CTACATATGGAGTGAGAACA | ACG |
| 4377905 | AACTGTCTAAGCACTCTAAA | ACT |
| 4579453 | TCTGCCTCCCTGGTTCA | ACT |
| 4260846 | ACAAACAAACAAACAAAAAAC | CGT |
| 1986481 | TTTTGCCAACTATTATCCC | CGT |
| 4628206 | CATGACACAGACCACAT | CGT |
| 2888017 | GAAATCCAAATTAAAACCACA | ACT |

Genetic Analysis

[0284] Allelotyping results are shown for female (F) and male (M) cases and controls in Table 18 and Table 19, respectively. Allele frequency is noted in the fourth and fifth columns for melanoma pools and control pools, respectively.

TABLE 18
Females

| | | | | | | | Melanoma |
|---|---|---|---|---|---|---|---|
| dbSNP | Chromsome | | Female | Female | F p- | Odds | Associated |
| rs# | Position | Alleles | Case AF | Control AF | Value | Ratio | Allele |
| 972346 | 82058784 | C/T | C = 0.950 | C = 0.957 | 0.710 | 1.18 | T |
| | | | T = 0.050 | T = 0.043 | | | |
| 985199 | 82030145 | G/A | G = 0.244 | G = 0.245 | 0.985 | 1.00 | A |
| | | | A = 0.756 | A = 0.755 | | | |
| 1024465 | 82010363 | G/A | G = 0.846 | G = 0.845 | 0.984 | 1.00 | G |
| | | | A = 0.154 | A = 0.155 | | | |
| 1044639 | 82049807 | G/T | G = 0.414 | G = 0.486 | 0.039 | 1.34 | T |
| | | | T = 0.586 | T = 0.514 | | | |
| 1859176 | 82026307 | C/T | C = 0.647 | C = 0.761 | 0.001 | 1.74 | T |
| | | | T = 0.353 | T = 0.239 | | | |
| 1859177 | 82026444 | C/T | C = 0.979 | C = | | | |
| | | | T = 0.021 | T = | | | |
| 1986481 | 82094932 | A/T | A = 0.438 | A = 0.375 | 0.080 | 0.77 | A |
| | | | T = 0.562 | T = 0.625 | | | |
| 2023847 | 82059542 | G/T | G = 0.465 | G = 0.358 | 0.003 | 0.64 | G |
| | | | T = 0.535 | T = 0.642 | | | |
| 2051791 | 82042987 | C/T | C = 0.450 | C = 0.541 | 0.013 | 1.44 | T |
| | | | T = 0.550 | T = 0.459 | | | |
| 2074401 | 82027835 | A/G | A = 0.620 | A = 0.557 | 0.118 | 0.77 | A |
| | | | G = 0.380 | G = 0.443 | | | |
| 2158220 | 82009218 | T/C | T = 0.733 | T = | | | |
| | | | C = 0.267 | C = | | | |
| 2189247 | 82045494 | C/A | C = 0.690 | C = 0.608 | 0.039 | 0.70 | C |
| | | | A = 0.310 | A = 0.392 | | | |
| 2189248 | 82053554 | T/C | T = 0.276 | T = 0.274 | 0.945 | 0.99 | T |
| | | | C = 0.724 | C = 0.726 | | | |
| 2214414 | 82042361 | T/C | T = 0.582 | T = 0.652 | 0.064 | 1.34 | C |
| | | | C = 0.418 | C = 0.348 | | | |
| 2214415 | 82043731 | G/A | G = 0.577 | G = 0.612 | 0.412 | 1.16 | A |
| | | | A = 0.423 | A = 0.388 | | | |
| 2247523 | 82052653 | C/G | C = 0.634 | C = 0.575 | 0.101 | 0.78 | C |
| | | | G = 0.366 | G = 0.425 | | | |
| 2257207 | 82066433 | A/T | A = 0.612 | A = 0.557 | 0.150 | 0.80 | A |
| | | | T = 0.388 | T = 0.443 | | | |
| 2301722 | 82063483 | A/C | A = 0.968 | A = 0.962 | 0.733 | 0.82 | A |
| | | | C = 0.032 | C = 0.038 | | | |
| 2371214 | 82052921 | T/C | T = 0.637 | T = 0.570 | 0.061 | 0.75 | T |
| | | | C = 0.363 | C = 0.430 | | | |
| 2371215 | 82055743 | T/A | T = 0.627 | T = 0.536 | 0.016 | 0.69 | T |
| | | | A = 0.373 | A = 0.464 | | | |
| 2522830 | 82041352 | G/A | G = 0.631 | G = 0.569 | 0.102 | 0.77 | G |
| | | | A = 0.369 | A = 0.431 | | | |
| 2522831 | 82046349 | T/C | T = | T = 0.672 | | | |
| | | | C = | C = 0.328 | | | |
| 2522832 | 82048613 | A/G | A = | A = 0.621 | | | |
| | | | G = | G = 0.379 | | | |
| 2522833 | 82051957 | C/A | C = 0.384 | C = 0.524 | 0.000 | 1.76 | A |
| | | | A = 0.616 | A = 0.476 | | | |
| 2522834 | 82059195 | T/C | T = 0.424 | T = 0.424 | 0.994 | 1.00 | C |
| | | | C = 0.576 | C = 0.576 | | | |
| 2522835 | 82069745 | A/T | A = 0.542 | A = 0.685 | 0.000 | 1.84 | T |
| | | | T = 0.458 | T = 0.315 | | | |
| 2522836 | 82071302 | C/A | C = 0.533 | C = 0.520 | 0.737 | 0.95 | C |
| | | | A = 0.467 | A = 0.480 | | | |
| 2522837 | 82073631 | A/G | A = 0.649 | A = 0.564 | 0.030 | 0.70 | A |
| | | | G = 0.351 | G = 0.436 | | | |
| 2522838 | 82073806 | A/T | A = 0.459 | A = 0.512 | 0.158 | 1.24 | T |
| | | | T = 0.541 | T = 0.488 | | | |
| 2522839 | 82075897 | G/A | G = 0.650 | G = 0.677 | 0.552 | 1.13 | A |
| | | | A = 0.350 | A = 0.323 | | | |
| 2522840 | 82076664 | G/T | G = 0.512 | G = 0.556 | 0.312 | 1.19 | T |
| | | | T = 6.488 | T = 0.444 | | | |
| 2522842 | 82077911 | G/T | G = 0.648 | G = 0.585 | 0.083 | 0.76 | G |
| | | | T = 0.352 | T = 0.415 | | | |
| 2522843 | 82077971 | C/A | C = 0.568 | C = 0.570 | 0.963 | 1.01 | A |
| | | | A = 0.432 | A = 0.430 | | | |
| 2522844 | 82078341 | T/C | T = 0.460 | T = 0.518 | 0.137 | 1.26 | C |
| | | | C = 0.540 | C = 0.482 | | | |
| 2522845 | 82080158 | T/G | T = 0.658 | T = 0.593 | 0.066 | 0.76 | T |
| | | | G = 0.342 | G = 0.407 | | | |
| 2715147 | 82046654 | T/C | T = 0.598 | T = 0.656 | 0.115 | 1.28 | C |
| | | | C = 0.402 | C = 0.344 | | | |
| 2715148 | 82048284 | A/C | A = 0.559 | A = 0.463 | 0.009 | 0.68 | A |
| | | | C = 0.441 | C = 0.537 | | | |
| 2715149 | 82051061 | A/T | A = 0.928 | A = 0.963 | 0.262 | 2.01 | T |
| | | | T = 0.072 | T = 0.037 | | | |
| 2715150 | 82054144 | A/G | A = 0.787 | A = 0.750 | 0.246 | 0.81 | A |
| | | | G = 0.213 | G = 0.250 | | | |
| 2715151 | 82054912 | C/G | C = 0.632 | C = 0.546 | 0.017 | 0.70 | C |
| | | | G = 0.368 | G = 0.454 | | | |
| 2715152 | 82055915 | G/A | G = 0.681 | G = 0.650 | 0.368 | 0.87 | G |
| | | | A = 0.319 | A = 0.350 | | | |
| 2715153 | 82056107 | T/C | T = 0.549 | T = 0.604 | 0.191 | 1.26 | C |
| | | | C = 0.451 | C = 0.396 | | | |
| 2715154 | 82059115 | G/T | G = 0.653 | G = 0.558 | 0.011 | 0.67 | G |
| | | | T = 0.347 | T = 0.442 | | | |
| 2715155 | 82060303 | A/G | A = 0.674 | A = 0.593 | 0.041 | 0.70 | A |
| | | | G = 0.326 | G = 0.407 | | | |
| 2715156 | 82061083 | A/G | A = 0.496 | A = 0.557 | 0.106 | 1.27 | G |
| | | | G = 0.504 | G = 0.443 | | | |
| 2715157 | 82066623 | A/G | A = 0.614 | A = 0.530 | 0.016 | 0.71 | A |
| | | | G = 0.386 | G = 0.470 | | | |
| 2715158 | 82067855 | G/C | G = 0.743 | G = 0.681 | 0.069 | 0.74 | G |
| | | | C = 0.257 | C = 0.319 | | | |
| 2715159 | 82069657 | A/G | A = 0.726 | A = 0.619 | 0.002 | 0.61 | A |
| | | | G = 0.274 | 6 = 0.381 | | | |
| 2715161 | 82080530 | C/T | C = 0.616 | C = 0.558 | 0.108 | 0.79 | C |
| | | | T = 0.384 | T = 0.442 | | | |
| 2888017 | 82098452 | A/G | A = 0.868 | A = 0.866 | 0.931 | 0.98 | A |
| | | | G = 0.132 | G = 0.134 | | | |
| 4260846 | 82093085 | C/A | C = 0.729 | C = 0.709 | 0.540 | 0.90 | C |
| | | | A = 0.271 | A = 0.291 | | | |
| 4299948 | 82028157 | T/G | T = | T = 0.246 | | | |
| | | | G = | G = 0.754 | | | |
| 4348435 | 82029900 | G/A | G = 0.736 | G = 0.742 | 0.838 | 1.03 | A |
| | | | A = 0.264 | A = 0.258 | | | |
| 4348436 | 82029921 | G/C | G = 0.814 | G = 0.821 | 0.801 | 1.05 | C |
| | | | C = 0.186 | C = 0.179 | | | |
| 4377905 | 82092560 | A/G | A = 0.956 | A = 0.961 | 0.795 | 1.14 | G |
| | | | G = 0.044 | G = 0.039 | | | |
| 4413718 | 82030064 | G/C | G = 0.960 | G = 0.972 | 0.568 | 1.44 | C |
| | | | C = 0.040 | C = 0.028 | | | |
| 4579453 | 82092970 | T/C | T = 0.957 | T = 0.912 | 0.048 | 0.46 | T |
| | | | C = 0.043 | C = 0.088 | | | |
| 4628206 | 82095592 | A/T | A = 0.854 | A = 0.847 | 0.790 | 0.94 | A |
| | | | T = 0.146 | T = 0.153 | | | |
| 4732483 | 82014796 | T/C | T = 0.112 | T = 0.108 | 0.866 | 0.96 | T |
| | | | C = 0.888 | C = 0.892 | | | |
| 4732485 | 82017875 | C/T | C = 0.050 | C = 0.047 | 0.894 | 0.94 | C |
| | | | T = 0.950 | T = 0.953 | | | |

[0285] TABLE 19
Males

| | | | | | | | Melanoma |
|---|---|---|---|---|---|---|---|
| dbSNP | Chromsome | | Male Case | Male | M p- | Odds | Associated |
| rs# | Position | Alleles | AF | Control AF | Value | Ratio | Allele |
| 972346 | 82058784 | C/T | C = 0.960 | C = 0.972 | 0.567 | 1.43 | T |
| | | | T = 0.040 | T = 0.028 | | | |
| 985199 | 82030145 | G/A | G = 0.224 | G = 0.222 | 0.950 | 0.99 | G |
| | | | A = 0.776 | A = 0.778 | | | |
| 1024465 | 82010363 | G/A | G = 0.865 | G = 0.878 | 0.664 | 1.13 | A |
| | | | A = 0.135 | A = 0.122 | | | |
| 1044639 | 82049807 | G/T | G = 0.429 | G = 0.489 | 0.111 | 1.27 | T |
| | | | T = 0.571 | T = 0.511 | | | |
| 1859176 | 82026307 | C/T | C = 0.657 | C = | | | |
| | | | T = 0.343 | T = | | | |
| 1859177 | 82026444 | C/T | C = | C = | | | |
| | | | T = | T = | | | |
| 1986481 | 82094932 | A/T | A = 0.485 | A = 0.417 | 0.067 | 0.76 | A |
| | | | T = 0.515 | T = 0.583 | | | |
| 2023847 | 82059542 | G/T | G = 0.467 | G = 0.400 | 0.072 | 0.76 | G |
| | | | T = 0.533 | T = 0.600 | | | |
| 2051791 | 82042987 | C/T | C = 0.469 | C = 0.562 | 0.033 | 1.45 | T |
| | | | T = 0.531 | T = 0.438 | | | |
| 2074401 | 82027835 | A/G | A = 0.633 | A = 0.574 | 0.123 | 0.78 | A |
| | | | G = 0.367 | G = 0.426 | | | |
| 2158220 | 82009218 | T/C | T = 0.740 | T = 0.682 | 0.105 | 0.75 | T |
| | | | C = 0.260 | C = 0.318 | | | |
| 2189247 | 82045494 | C/A | C = 0.654 | C = 0.626 | 0.438 | 0.89 | C |
| | | | A = 0.346 | A = 0.374 | | | |
| 2189248 | 82053554 | T/C | T = 0.246 | T = 0.238 | 0.831 | 0.96 | T |
| | | | C = 0.754 | C = 0.762 | | | |
| 2214414 | 82042361 | T/C | T = 0.557 | T = 0.632 | 0.068 | 1.37 | C |
| | | | C = 0.443 | C = 0.368 | | | |
| 2214415 | 82043731 | G/A | G = 0.623 | G = 0.622 | 0.979 | 0.99 | G |
| | | | A = 0.377 | A = 0.378 | | | |
| 2247523 | 82052653 | C/G | C = 0.646 | C = 0.582 | 0.081 | 0.76 | C |
| | | | G = 0.354 | G = 0.418 | | | |
| 2257207 | 82066433 | A/T | A = 0.623 | A = 0.582 | 0.278 | 0.84 | A |
| | | | T = 0.377 | T = 0.418 | | | |
| 2301722 | 82063483 | A/C | A = 0.966 | A = 0.980 | 0.483 | 1.71 | C |
| | | | C = 0.034 | C = 0.020 | | | |
| 2371214 | 82052921 | T/C | T = 0.620 | T = 0.593 | 0.501 | 0.89 | T |
| | | | C = 0.380 | C = 0.407 | | | |
| 2371215 | 82055743 | T/A | T = 0.620 | T = 0.544 | 0.038 | 0.73 | T |
| | | | A = 0.380 | A = 0.456 | | | |
| 2522830 | 82041352 | G/A | G = 0.660 | G = 0.574 | 0.025 | 0.70 | G |
| | | | A = 0.340 | A = 0.426 | | | |
| 2522831 | 82046349 | T/C | T = 0.714 | T = 0.700 | 0.728 | 0.93 | T |
| | | | C = 0.286 | C = 0.300 | | | |
| 2522832 | 82048613 | A/G | A = 0.663 | A = 0.629 | 0.367 | 0.86 | A |
| | | | G = 0.337 | G = 0.371 | | | |
| 2522833 | 82051957 | C/A | C = 0.397 | C = 0.504 | 0.006 | 1.54 | A |
| | | | A = 0.603 | A = 0.496 | | | |
| 2522834 | 82059195 | T/C | T = 0.387 | T = 0.428 | 0.260 | 1.19 | C |
| | | | C = 0.613 | C = 0.572 | | | |
| 2522835 | 82069745 | A/T | A = 0.535 | A = 0.652 | 0.001 | 1.63 | T |
| | | | T = 0.465 | T = 0.348 | | | |
| 2522836 | 82071302 | C/A | C = 0.570 | C = 0.544 | 0.535 | 0.90 | C |
| | | | A = 0.430 | A = 0.456 | | | |
| 2522837 | 82073631 | A/G | A = 0.640 | A = 0.607 | 0.383 | 0.87 | A |
| | | | G = 0.360 | G = 0.393 | | | |
| 2522838 | 82073806 | A/T | A = 0.452 | A = 0.518 | 0.097 | 1.30 | T |
| | | | T = 0.548 | T = 0.482 | | | |
| 2522839 | 82075897 | G/A | G = | G = 0.664 | | | |
| | | | A = | A = 0.336 | | | |
| 2522840 | 82076664 | G/T | G = 0.488 | G = 0.551 | 0.120 | 1.29 | T |
| | | | T = 0.512 | T = 0.449 | | | |
| 2522842 | 82077911 | G/T | G = 0.647 | G = 0.604 | 0.222 | 0.83 | G |
| | | | T = 0.353 | T = 0.396 | | | |
| 2522843 | 82077971 | C/A | C = 0.576 | C = 0.543 | 0.387 | 0.87 | C |
| | | | A = 0.424 | A = 0.457 | | | |
| 2522844 | 82078341 | T/C | T = 0.459 | T = 0.501 | 0.257 | 1.19 | C |
| | | | C = 0.541 | C = 0.499 | | | |
| 2522845 | 82080158 | T/G | T = 0.678 | T = 0.604 | 0.062 | 0.73 | T |
| | | | G = 0.322 | G = 0.396 | | | |
| 2715147 | 82046654 | T/C | T = 0.573 | T = 0.612 | 0.366 | 1.17 | C |
| | | | C = 0.427 | C = 0.388 | | | |
| 2715148 | 82048284 | A/C | A = 0.557 | A = 0.502 | 0.166 | 0.80 | A |
| | | | C = 0.443 | C = 0.498 | | | |
| 2715149 | 82051061 | A/T | A = 0.907 | A = 0.941 | 0.177 | 1.62 | T |
| | | | T = 0.093 | T = 0.059 | | | |
| 2715150 | 82054144 | A/G | A = 0.802 | A = 0.779 | 0.490 | 0.87 | A |
| | | | G = 0.198 | G = 0.221 | | | |
| 2715151 | 82054912 | C/G | C = 0.631 | C = 0.597 | 0.438 | 0.86 | C |
| | | | G = 0.369 | G = 0.403 | | | |
| 2715152 | 82055915 | G/A | G = 0.718 | G = 0.688 | 0.480 | 0.87 | G |
| | | | A = 0.282 | A = 0.312 | | | |
| 2715153 | 82056107 | T/C | T = 0.491 | T = 0.595 | 0.023 | 1.52 | C |
| | | | C = 0.509 | C = 0.405 | | | |
| 2715154 | 82059115 | G/T | G = 0.632 | G = 0.574 | 0.108 | 0.78 | G |
| | | | T = 0.368 | T = 0.426 | | | |
| 2715155 | 82060303 | A/G | A = 0.663 | A = | | | |
| | | | G = 0.337 | G = | | | |
| 2715156 | 82061083 | A/G | A = 0.412 | A = 0.533 | 0.009 | 1.63 | G |
| | | | G = 0.588 | G = 0.467 | | | |
| 2715157 | 82066623 | A/G | A = 0.618 | A = | | | |
| | | | G = 0.382 | G = | | | |
| 2715158 | 82067855 | G/C | G = 0.749 | G = 0.683 | 0.112 | 0.72 | G |
| | | | C = 0.251 | C = 0.317 | | | |
| 2715159 | 82069657 | A/G | A = 0.733 | A = 0.635 | 0.005 | 0.63 | A |
| | | | G = 0.267 | G = 0.365 | | | |
| 2715161 | 82080530 | C/T | C = 0.667 | C = 0.592 | 0.066 | 0.73 | C |
| | | | T = 0.333 | T = 0.408 | | | |
| 2888017 | 82098452 | A/G | A = 0.902 | A = 0.895 | 0.788 | 0.92 | A |
| | | | G = 0.098 | G = 0.105 | | | |
| 4260846 | 82093085 | C/A | C = 0.726 | C = 0.708 | 0.618 | 0.91 | C |
| | | | A = 0.274 | A = 0.292 | | | |
| 4299948 | 82028157 | T/G | T = 0.089 | T = 0.337 | 0.000 | 5.20 | G |
| | | | G = 0.911 | G = 0.663 | | | |
| 4348435 | 82029900 | G/A | G = 0.760 | G = 0.773 | 0.701 | 1.07 | A |
| | | | A = 0.240 | A = 0.227 | | | |
| 4348436 | 82029921 | G/C | G = 0.832 | G = 0.865 | 0.257 | 1.29 | C |
| | | | C = 0.168 | C = 0.135 | | | |
| 4377905 | 82092560 | A/G | A = 0.956 | A = 0.979 | 0.243 | 2.19 | G |
| | | | G = 0.044 | G = 0.021 | | | |
| 4413718 | 82030064 | G/C | G = 0.961 | G = 0.980 | 0.339 | 1.96 | C |
| | | | C = 0.039 | C = 0.020 | | | |
| 4579453 | 82092970 | T/C | T = 0.960 | T = 0.900 | 0.021 | 0.37 | T |
| | | | C = 0.040 | C = 0.100 | | | |
| 4628206 | 82095592 | A/T | A = 0.864 | A = 0.859 | 0.851 | 0.96 | A |
| | | | T = 0.136 | T = 0.141 | | | |
| 4732483 | 82014796 | T/C | T = 0.115 | T = 0.111 | 0.903 | 0.97 | T |
| | | | C = 0.885 | C = 0.889 | | | |
| 4732485 | 82017875 | C/T | C = 0.038 | C = 0.029 | 0.690 | 0.76 | C |
| | | | T = 0.962 | T = 0.971 | | | |

[0286] Allelotyping results were considered significant with a calculated p-value of less than or equal to 0.05 for allelotype results. These values are indicated in bold. The assay failed for those SNPs in which the allele frequency is blank. The combined allelotyping p-values for males and females were plotted in FIG. 15 and separately for females and males in FIGS. 16 and 17, respectively. The position of each SNP on the chromosome is presented on the x-axis. The y-axis gives the negative logarithm (base 10) of the p-value comparing the estimated allele in the case group to that of the control group. The minor allele frequency of the control group for each SNP designated by an X or other symbol on the graphs in FIGS. 15, 16 and 17 can be determined by consulting Table 18 or 19. By proceeding down the Table from top to bottom and across the graphs from left to right the allele frequency associated with each symbol shown can be determined.

[0287] To aid the interpretation, multiple lines have been added to the graph. The broken horizontal lines are drawn at two common significance levels, 0.05 and 0.01. The vertical broken lines are drawn every 20 kb to assist in the interpretation of distances between SNPs. Two other lines are drawn to expose linear trends in the association of SNPs to the disease. The light gray line (or generally bottom-most curve) is a nonlinear smoother through the data points on the graph using a local polynomial regression method (W. S. Cleveland, E. Grosse and W. M. Shyu (1992) Local regression models. Chapter 8 of Statistical Models in S eds J. M. Chambers and T. J. Hastie, Wadsworth & Brooks/Cole.). The black line (or generally top-most curve, e.g., see peak in left-most graph just to the left of position 92150000) provides a local test for excess statistical significance to identify regions of association. This was created by use of a 10 kb sliding window with 1 kb step sizes. Within each window, a chi-square goodness of fit test was applied to compare the proportion of SNPs that were significant at a test wise level of 0.01, to the proportion that would be expected by chance alone (0.05 for the methods used here). Resulting p-values that were less than 10⁻⁸ were truncated at that value.

[0288] Finally, the exons and introns of the genes in the covered region are plotted below each graph at the appropriate chromosomal positions. The gene boundary is indicated by the broken horizontal line. The exon positions are shown as thick, unbroken bars. An arrow is place at the 3′ end of each gene to show the direction of transcription.

### Example 7

FPGT/CARK Proximal SNPs

[0289] It has been discovered that a polymorphic variation (rs2034453) in an intron of a gene encoding cardiac ankyrin repeat kinase (CARK) and near a gene encoding fucose-1-phosphate guanylyltransferase (FPGT) is associated with the occurrence of melanoma. See Table 3. Subsequently, seventy-one allelic variants located within or nearby the target genes were identified and subsequently allelotyped in melanoma case and control sample sets as described in Examples 1 and 2. The polymorphic variants are set forth in Table 20. The chromosome position provided in column four of Table 20 is based on Genome “Build 33” of NCBI's GenBank.

TABLE 20

| | | | | | Allele | |
|---|---|---|---|---|---|---|
| dbSNP | | Position in | Chromosome | Allele | Present | IUPAC |
| rs# | Chromosome | | Position | Variants | in FIG. 3 | Code |
| 1412825 | 1 | 157 | 74048557 | G/C | C | S |
| 4422957 | 1 | 492 | 74048892 | C/T | T | Y |
| 944795 | 1 | 1291 | 74049691 | C/G | G | S |
| 792310 | 1 | 1836 | 74050236 | G/A | G | R |
| 526736 | 1 | 2085 | 74050485 | A/T | A | W |
| 522042 | 1 | 2617 | 74051017 | G/A | C | Y |
| 577367 | 1 | 4029 | 74052429 | C/T | A | R |
| 575754 | 1 | 4171 | 74052571 | T/C | G | R |
| 573721 | 1 | 4444 | 74052844 | G/T | C | M |
| 487917 | 1 | 5239 | 74053639 | C/T | G | R |
| 792307 | 1 | 5343 | 74053743 | G/A | C | Y |
| 476350 | 1 | 5650 | 74054050 | T/C | C | Y |
| 571848 | 1 | 7862 | 74056262 | A/G | A | R |
| 491623 | 1 | 8817 | 74057217 | A/G | G | R |
| 956 | 1 | 8983 | 74057383 | T/A | T | W |
| 520806 | 1 | 9684 | 74058084 | C/T | C | Y |
| 522759 | 1 | 9925 | 74058325 | T/C | T | Y |
| 545664 | 1 | 10120 | 74058520 | G/A | A | R |
| 545721 | 1 | 10142 | 74058542 | C/T | T | Y |
| 536355 | 1 | 10519 | 74058919 | G/A | A | R |
| 553044 | 1 | 10916 | 74059316 | G/T | T | K |
| 581353 | 1 | 11729 | 74060129 | A/G | A | R |
| 560808 | 1 | 14576 | 74062976 | C/A | C | M |
| 485929 | 1 | 14628 | 74063028 | A/G | A | R |
| 477134 | 1 | 15257 | 74063657 | T/G | T | K |
| 505634 | 1 | 15994 | 74064394 | G/A | A | R |
| 542136 | 1 | 16203 | 74064603 | G/A | A | R |
| 545680 | 1 | 16583 | 74064983 | T/C | T | Y |
| 575961 | 1 | 17553 | 74065953 | C/T | T | Y |
| 792321 | 1 | 18311 | 74066711 | A/G | A | R |
| 524306 | 1 | 18596 | 74066996 | T/A | A | W |
| 495027 | 1 | 18602 | 74067002 | A/C | C | M |
| 525358 | 1 | 19647 | 74068047 | A/G | A | R |
| 471496 | 1 | 20249 | 74068649 | G/A | G | R |
| 504866 | 1 | 21583 | 74069983 | C/T | T | Y |
| 532396 | 1 | 23235 | 74071635 | T/C | C | Y |
| 533371 | 1 | 23355 | 74071755 | G/A | A | R |
| 567060 | 1 | 24707 | 74073107 | A/G | A | R |
| 3753183 | 1 | 35442 | 74083842 | G/T | T | K |
| 492302 | 1 | 35674 | 74084074 | G/C | C | S |
| 518769 | 1 | 36255 | 74084655 | A/G | G | R |
| 474215 | 1 | 36594 | 74084994 | T/C | C | Y |
| 500203 | 1 | 37994 | 74086394 | T/A | A | W |
| 532221 | 1 | 38293 | 74086693 | T/A | T | W |
| 792323 | 1 | 43937 | 74092337 | C/T | C | Y |
| 3765651 | 1 | 45705 | 74094105 | A/C | C | M |
| 481387 | 1 | 46793 | 74095193 | C/T | C | Y |
| 483259 | 1 | 46972 | 74095372 | T/C | C | Y |
| 2034453 | 1 | 48524 | 74096924 | A/G | A | R |
| 792324 | 1 | 49414 | 74097814 | T/C | T | Y |
| 792327 | 1 | 55056 | 74103456 | G/A | A | R |
| 792328 | 1 | 55487 | 74103887 | C/A | C | M |
| 570631 | 1 | 56198 | 74104598 | T/A | T | W |
| 4593767 | 1 | 59436 | 74107836 | G/A | G | R |
| 576802 | 1 | 60639 | 74109039 | T/A | A | W |
| 518574 | 1 | 67381 | 74115781 | A/G | A | R |
| 524252 | 1 | 68940 | 74117340 | C/T | C | Y |
| 2039407 | 1 | 70713 | 74119113 | A/T | A | W |
| 503770 | 1 | 71789 | 74120189 | T/C | T | Y |
| 503904 | 1 | 71848 | 74120248 | A/G | A | R |
| 2027013 | 1 | 72488 | 74120888 | T/G | G | K |
| 514012 | 1 | 73424 | 74121824 | A/G | A | R |
| 1412827 | 1 | 73940 | 74122340 | A/G | A | R |
| 473834 | 1 | 79377 | 74127777 | G/A | A | R |
| 480267 | 1 | 80067 | 74128467 | A/G | G | R |
| 792329 | 1 | 82225 | 74130625 | C/T | C | Y |
| 572180 | 1 | 85542 | 74133942 | G/T | G | K |
| 1333029 | 1 | 85665 | 74134065 | G/A | G | R |
| 485414 | 1 | 85785 | 74134185 | A/G | A | R |
| 1412823 | 1 | 86109 | 74134509 | A/T | T | W |
| 548881 | 1 | 94888 | 74143288 | CAT | C | Y |

Assay for Verifying and Allelotyping SNPs

[0290] The methods used to verify and allelotype the seventy-one proximal SNPs of Table 20 are the same methods described in Examples 1 and 2 herein. The primers and probes used in these assays are provided in Table 21 and Table 22, respectively.

TABLE 21

| | | |
|---|---|---|
| dbSNP | Forward | Reverse |
| rs# | PCR primer | PCR primer |

| | | |
|---|---|---|
| 1412825 | GGCGCACGCCTCCACGTCCTGAGACCGTTGC | GGCGCACGCCTTGGCTGGCGCCCGGAAAA |
| | TAGAG | |
| 4422957 | ACGTTGGATGATTAGCTAGCTACTCCTGGG | ACGTTGGATGGTTTGCTGGACTGTCACTTC |
| 944795 | ACGTTGGATGCCAGCTTTGCAAATCAATTC | ACGTTGGATGGAAGGGATCTTTGGGTTGTG |
| 792310 | ACGTTGGATGAAAGGAGTTACCCCTTGGAG | ACGTTGGATGACTGACCATAAAGCGCGTAC |
| 526736 | ACGTTGGATGACTGATAAGGTCCAAAGGAG | ACGTTGGATGCCTTGAAAAACTTCCAGAATG |
| 522042 | ACGTTGGATGAGGAGAATGGCCTGAACCTG | ACGTTGGATGGAAGGAGTCTTGCTCTGTTG |
| 577367 | GGCGCACGCCTCCACGTACTAGACTTTTGCC | GGCGCACGCCTTTTTAAGCATTGTGGCCTC |
| | AGTAC | |
| 575754 | ACGTTGGATGCAAAGGTTTTCATGTAACCA | ACGTTGGATGGAAAAGTAGGAAGGACATGG |
| 573721 | ACGTTGGATGCCTGGTATCTAATTTAATTTT | ACGTTGGATGCTGGTTTGAAGCCTAAAAATG |
| 487917 | ACGTTGGATGTACCAGCATCACCACTTGAG | ACGTTGGATGTCACCTAGTGATGTTGGAGC |
| 792307 | ACGTTGGATGCTAATGCTAAAATACTTGCTTC | ACGTTGGATGGGGACAACCTATGTATATGC |
| 476350 | ACGTTGGATGGGTTTCACCGTGTTAGCCAG | ACGTTGGATGATACCAACACTTTGGGAGGC |
| 571848 | ACGTTGGATGCTCAAAAAGGCAAAGTGTAC | ACGTTGGATGCAGGGAACAAATTTTTCTAG |
| 491623 | ACGTTGGATGCATAACTTGAGATTCTAGCC | ACGTTGGATGAGAAGCAGGCAGGAAAATGG |
| 956 | GGCGCACGCCTCCACGCTCCTTGGGAAAAAC | GGCGCACGCCAGTCTGTGCTACTTTATGTC |
| | TTTGG | |
| 520806 | ACGTTGGATGTTCAGACAGGTCACTTCTGG | ACGTTGGATGGTCAGAAAGAGATTTCTCACA |
| 522759 | ACGTTGGATGGCTCAATACTGTATTTTAACC | ACGTTGGATGCAAAGCAACCAGAATCCATG |
| 545664 | GGCGCACGCCTCCACGGACCAAGTTCACATG | GGCGCACGCCCCCAGAAAACAGAATGTGCC |
| | TGAGC | |
| 545721 | GGCGCACGCCTCCACGCCCAGAAAACAGAAT | GGCGCACGCCGACCAAGTTCACATGTGAGC |
| | GTGCC | |
| 536355 | GGCGCACGCCTCCACGGACCTACATGGATAA | ATAGCAGGCTTTTACACACC |
| | GTTTG | |
| 553044 | ACGTTGGATGCTGCCTTCTGTCACATATAG | ACGTTGGATGCAAGTCCAGACGGCATCATG |
| 581353 | ACGTTGGATGCAATCAGTTACTTGCATGCAC | ACGTTGGATGATCACCTACCTGCACATCAG |
| 560808 | ACGTTGGATGAGGCTTTCTGCAACTTTGCG | ACGTTGGATGCAATGCCTTATTGTGTGCAG |
| 485929 | ACGTTGGATGTTCAATGCCTCATACACCCC | ACGTTGGATGACGCAAAGTTGCAGAAAGCC |
| 477134 | ACGTTGGATGCTGTGCTCTGATATGTATCC | ACGTTGGATGCTGAATCATTGGAGCTAGGG |
| 505634 | ACGTTGGATGTTCTCCTCATCTTCCTCACC | ACGTTGGATGAGGAGTGAATGTGGATAGAG |
| 542136 | ACGTTGGATGAAGCCAGCAGGATTATGAAG | ACGTTGGATGCTCTGTTATTGGAAAAAATTC |
| 545680 | ACGTTGGATGCCCCCACAAATTCTGTAACG | ACGTTGGATGAATGAAAGTACACTCTACAG |
| 575961 | ACGTTGGATGGCACTGGACACCTGTTATTC | ACGTTGGATGGCACAAAATATACCATCGTC |
| 792321 | GGCGCACGCCTCCACGCTTCTCTGGTCTCCT | GGCGCACGCCGTTTCCCATGGCCTAAGATG |
| | GATAG | |
| 524306 | GGCGCACGCCTCCACGAAGCCTCCCAAAAAT | GGCGCACGCCTTGGTTTGGGATAAAGGAGG |
| | ATGCC | |
| 495027 | GGCGCACGCCTCCACGTTGGTTTGGGATAAA | GGCGCACGCCCCTAATAATCTAAAGCCTCCC |
| | GGAGG | |
| 525358 | GGCGCACGCCTCCACGCACACTACACTTTGA | GGCGCACGCCATCTCTTAGTTTGGTACGCG |
| | CTGGG | |
| 471496 | ACGTTGGATGGTTTATTTACTTTGAACCTG | ACGTTGGATGTCATTTCCAAGAAATATGTG |
| 504866 | ACGTTGGATGTAAAAATCTTAGACAGTGGG | ACGTTGGATGTCTAAATTGTGTCCAGACTC |
| 532396 | GGCGCACGCCTCCACGCAAGACTTGTAATCA | GGCGCACGCCTTCTAACTGTGGTGTTTCTG |
| | AATCC | |
| 533371 | GGCGCACGCCTCCACGTTACTGGTACGGGAA | GGCGCACGCCGGAAATTGTACATGCAAAGG |
| | GAATG | |
| 567060 | ACGTTGGATGAACAAGAGCGAAACCCTGTC | ACGTTGGATGATAAACCAAGAGGCATGGTG |
| 3753183 | ACGTTGGATGTGTGGGAGAATTCAACTGAG | ACGTTGGATGAGCTTTGGCTTTCAAAGGTG |
| 492302 | ACGTTGGATGTTCCTCCATATGTGGAAAAC | ACGTTGGATGTCTTATTTCTAATATCTCGG |
| 518769 | ACGTTGGATGCAAACAACTCTCTTTTTGAA | ACGTTGGATGGGAAGCCTTACCTCTGAAAC |
| 474215 | ACGTTGGATGATGGAAGGTGCATGAAAGAG | ACGTTGGATGCAGTTCTGACCATGTGACTC |
| 500203 | GGCGCACGCCTCCACGGCAAAATGTAGACAC | GGCGCACGCCTCGAATGGGTTCTTCATTAC |
| | AGATC | |
| 532221 | ACGTTGGATGTATGTCTGAGGTTCTACGGG | ACGTTGGATGCTTTGTATAAGTGTCTTCAG |
| 792323 | ACGTTGGATGAATGGCGTGAATCCAGGAGG | ACGTTGGATGTTTTTCAGACGGAGTCTCGC |
| 3765651 | ACGTTGGATGTGGATCACAAAACTGCACAC | ACGTTGGATGCCCAAAGGTTACTTTCTTTC |
| 481387 | GGCGCACGCCTCCACGCCATTCAATAAGTCT | GGCGCACGCCAACCTGAAGTGAGCCTTAAG |
| | GGCAC | |
| 483259 | GGCGCACGCCTCCACGTTTGAGTCTCTCCAC | GGCGCACGCCCAGAACTGCACATGAGATTC |
| | TGTTG | |
| 2034453 | ACGTTGGATGTTGCTGGACAATAGAAAGAC | ACGTTGGATGGTGACTGGAAACTGAGAATG |
| 792324 | ACGTTGGATGTGTGATCTTGCTGGCTTCAG | ACGTTGGATGTGCTTCTCACTCTTTGGGTC |
| 792327 | ACGTTGGATGTGGTCCGTTTTACAGAGAGC | ACGTTGGATGTGTGTCTAGCTCAGGGATTG |
| 792328 | ACGTTGGATGTCAGCAGGCCATAGCTGCCTC | ACGTTGGATGATGCAAGAGCCCATGGCAGG |
| 570631 | ACGTTGGATGAAGACTGAAGTGGCAACAGG | ACGTTGGATGTTGCATTTTGTCCCATTTCC |
| 4593767 | ACGTTGGATGGTCCAATCTGCTGTTTTCAAC | ACGTTGGATGATTGATATATGAAGAAACAG |
| 576802 | GGCGCACGCCTCCACGGGCAATGGATGACAA | GGCGCACGCCTCTACTTTTGCATTGCTTCC |
| | TAGTA | |
| 518574 | ACGTTGGATGAGGTGGTGGTAAAAGAAGGG | ACGTTGGATGGAGCTCCAGAGGAAAAATTG |
| 524252 | GGCGCACGCCTCCACGTGGAAGAATGAGGCT | GGCGCACGCCTGGGAGATCTATTCTACCTC |
| | TAGAC | |
| 2039407 | GGCGCACGCCTCCACGTAAGGTGGTTACAAT | GGCGCACGCCAATGACTATGTGCACTGGAG |
| | TACTC | |
| 503770 | GGCGCACGCCTCCACGTTGAGATGCCATTGA | GGCGCACGCCAATGCATCTTTGGTCCTGAC |
| | TAGGC | |
| 503904 | GGCGCACGCCTCCACGCTAAGCTGCTTTCCC | GGCGCACGCCGAAGTCAGGACCAAAGATGC |
| | ATTCC | |
| 2027013 | ACGTTGGATGCTTCCCGTTTTTCTACCTGC | ACGTTGGATGGAGCCAATGAAAGAAGAAAGG |
| 514012 | GGCGCACGCCTCCACGCTCAGATGGTGGAAA | GGCGCACGCCTCTTGTTCAAGCGGTAGAGG |
| | GTAGG | |
| 1412827 | GGCGCACGCCTCCACGCCTCTGTATATCTAG | GGCGCACGCCGCTTTGGATAGTCAATTCAG |
| | CTACC | |
| 473834 | GGCGCACGCCTCCACGCTACCTTCACATCTG | GGCGCACGCCTCTTGTGGGTATAAGCTGTG |
| | TAGTC | |
| 480267 | GGCGCACGCCTCCACGTTGGAGAGGAAACTA | GGCGCACGCCCATCCAAATGTTTCAGTAGAG |
| | AAGCG | |
| 792329 | ACGTTGGATGCACCACGCCCAGCTAATTTT | ACGTTGGATGGTCAGGAGATCAAGACCATC |
| 572180 | ACGTTGGATGCAGGTCTTTGGCATAGACTC | ACGTTGGATGAGCTTTTCTTGCTTATGCTC |
| 1333029 | ACGTTGGATGGCCCTGGAAAATGATGGAAG | ACGTTGGATGGGGATTTCTCATATCAGGTTG |
| 485414 | ACGTTGGATGGTGTATATACATTATCTACAT | ACGTTGGATGGCACTGAATTTGCTTCCAAC |
| 1412823 | GGCGCACGCCTCCACGAAACCTCTGAGCTCA | GGCGCACGCCGTATTCCTAATTAAGGGGAAG |
| | CTATG | |
| 548881 | ACGTTGGATGCACCCTGGGAAACTATAAAC | ACGTTGGATGGTAGTTCTATAAGGTTTTGCC |
| 1412825 | GGCGCACGCCTCCACGTCCTGAGACCGTTGC | GGCGCACGCCTTGGCTGGCGCCCGGAAAA |
| | TAGAG | |
| 4422957 | ACGTTGGATGATTAGCTAGCTACTCCTGGG | ACGTTGGATGGTTTGCTGGACTGTCACTTC |
| 944795 | ACGTTGGATGCCAGCTTTGCAAATCAATTC | ACGTTGGATGGAAGGGATCTTTGGGTTGTG |
| 792310 | ACGTTGGATGAAAGGAGTTACCCCTTGGAG | ACGTTGGATGACTGACCATAAAGCGCGTAC |
| 526736 | ACGTTGGATGACTGATAAGGTCCAAAGGAG | ACGTTGGATGCCTTGAAAAACTTCCAGAATG |
| 522042 | ACGTTGGATGAGGAGAATGGCCTGAACCTG | ACGTTGGATGGAAGGAGTCTTGCTCTGTTG |
| 577367 | GGCGCACGCCTCCACGTACTAGACTTTTGCC | GGCGCACGCCTTTTTAAGCATTGTGGCCTC |
| | AGTAC | |
| 575754 | ACGTTGGATGCAAAGGTTTTCATGTAACCA | ACGTTGGATGGAAAAGTAGGAAGGACATGG |
| 573721 | ACGTTGGATGCCTGGTATCTAATTTAATTTT | ACGTTGGATGCTGGTTTGAAGCCTAAAAATG |
| 487917 | ACGTTGGATGTACCAGCATCACCACTTGAG | ACGTTGGATGTCACCTAGTGATGTTGGAGC |
| 792307 | ACGTTGGATGCTAATGCTAAAATACTTGCTTC | ACGTTGGATGGGGACAACCTATGTATATGC |
| 476350 | ACGTTGGATGGGTTTCACCGTGTTAGCCAG | ACGTTGGATGATACCAACACTTTGGGAGGC |
| 571848 | ACGTTGGATGCTCAAAAAGGCAAAGTGTAC | ACGTTGGATGCAGGGAACAAATTTTTCTAG |
| 491623 | ACGTTGGATGCATAACTTGAGATTCTAGCC | ACGTTGGATGAGAAGCAGGCAGGAAAATGG |
| 956 | GGCGCACGCCTCCACGCTCCTTGGGAAAAAC | GGCGCACGCCAGTCTGTGCTACTTTATGTC |
| | TTTGG | |
| 520806 | ACGTTGGATGTTCAGACAGGTCACTTCTGG | ACGTTGGATGGTCAGAAAGAGATTTCTCACA |
| 522759 | ACGTTGGATGGCTCAATACTGTATTTTAACC | ACGTTGGATGCAAAGCAACCAGAATCCATG |
| 545664 | GGCGCACGCCTCCACGGACCAAGTTCACATG | GGCGCACGCCCCCAGAAAACAGAATGTGCC |
| | TGAGC | |
| 545721 | GGCGCACGCCTCCACGCCCAGAAAACAGAAT | GGCGCACGCCGACCAAGTTCACATGTGAGC |
| | GTGCC | |
| 536355 | GGCGCACGCCTCCACGGACCTACATGGATAA | ATAGCAGGCTTTTACACACC |
| | GTTTG | |
| 553044 | ACGTTGGATGCTGCCTTCTGTCACATATAG | ACGTTGGATGCAAGTCCAGACGGCATCATG |
| 581353 | ACGTTGGATGCAATCAGTTACTTGCATGCAC | ACGTTGGATGATCACCTACCTGCACATCAG |

[0291] TABLE 22

| | | |
|---|---|---|
| dbSNP | Extend | Term |
| rs# | Probe | Mix |

| | | |
|---|---|---|
| 1412825 | GCGCCCGGAAAACCATGAT | ACT |
| 4422957 | CCGTTTACTTCTCATCTG | ACG |
| 944795 | CCTAACACCAAGTGTCC | ACT |
| 792310 | TTGGCTCCAGCAGGATC | ACG |
| 526736 | TTCCAGAATGTTACTTAAAAGA | CGT |
| 522042 | TAGCTCACTCCAAGCTC | ACG |
| 577367 | GCATTGTGGCCTCTGGCTA | ACG |
| 575754 | GGACATGGTCTCAGAAT | ACT |
| 573721 | GAAGCCTAAAAATGTGTAAAA | CGT |
| 487917 | CCATTGTAAAGTCCTAGCA | ACG |
| 792307 | TGCTGTCCATCATTGAG | ACG |
| 476350 | GGCAGGCAGATCACGAG | ACT |
| 571848 | AAAAGCAGTTTGATGTAGAG | ACT |
| 491623 | ACAGGTGATAAACAGTTTC | ACT |
| 956 | GTCAATATAAAAATTGGTAAAC | CGT |
| 520806 | AAGAGATTTCTCACAAATTGA | ACG |
| 522759 | CAGAATCCATGCATTGT | ACT |
| 545664 | GCTATTAGCCAGGCAGCAA | ACG |
| 545721 | GCTGCCTGGCTAATAGCTA | ACG |
| 536355 | CTGAGTATATGATGTAAG | ACG |
| 553044 | GTATGTAAACAGCAACTCTG | CGT |
| 581353 | GTCTAAAGATGTTCATCCC | ACT |
| 560808 | GTGTGCAGTAATAACAATGAT | CGT |
| 485929 | AGAAAGCCTGCAAAGGA | ACT |
| 477134 | TGGAGCTAGGGAGGAAG | ACT |
| 505634 | ATGTGGATAGAGAAATTCAAA | ACG |
| 542136 | TTTTCTTCCTTGTAGCATC | ACG |
| 545680 | CACTCTACAGTGTGGGA | ACT |
| 575961 | CATCGTCATAGTAGAGATTC | ACG |
| 792321 | AAGATGAATGGACTCTCCTGT | ACT |
| 524306 | GGACATATTTACTTCTAGCTGAT | CGT |
| 495027 | CCTCCCAAAAATATGCCTTTG | ACT |
| 525358 | CGAGAGTGCTCGGTGCATA | ACT |
| 471496 | GAAATATGTGTTTTAACGAGAA | ACG |
| 504866 | GTGTCCAGACTCTTGATT | ACG |
| 532396 | CTGTGGTGTTTCTGATGCCT | ACT |
| 533371 | TGCAAAGGTGTTAGAAGCACCTC | ACG |
| 567060 | AGGCATGGTGCTTAGAT | ACT |
| 3753183 | CGATGAGTTTGAAAATCCA | CGT |
| 492302 | TCTCGGATCTTCCATCC | ACT |
| 518769 | CTGAGCAAAAATATATGGTGA | ACT |
| 474215 | GTGACTCTAATATCCAAGCTA | ACT |
| 500203 | AAACATCTGCATTTTAAAC | CGT |
| 532221 | TGTCTTCAGTATTCACCTTA | CGT |
| 792323 | AGGCTGGAGTGCAGTGG | ACG |
| 3765651 | TTCCTAGCCTTTACCTTT | ACT |
| 481387 | AGGCGTATAGTAGGTGTTTAG | ACG |
| 483259 | CTCTTATTTAAACTTGATCTCTC | ACT |
| 2034453 | AAACTGAGAATGTTGATGGACA | ACT |
| 792324 | GTCCGCACTGCCTTTAT | ACT |
| 792327 | ATGCACCAATCAGCACC | ACG |
| 792328 | GGGAAGCTCAGGCATGG | CGT |
| 570631 | TCCCATTTCCATTATTTTTTTT | CGT |
| 4593767 | GAAGAAACAGAAAAATGTGC | ACG |
| 576802 | TTGCATTGCTTCCAAAATGATC | CGT |
| 518574 | AGAGGAAAAATTGCCTATG | ACT |
| 524252 | TTCTCAAGGATATAGCTGGAG | ACG |
| 2039407 | GTGCACTGGAGCAGTTCTG | CGT |
| 503770 | CTGCTAAGTCTGAGTCCCAT | ACT |
| 503904 | AAGATGCATTTATCAGATTGTATA | ACT |
| 2027013 | AAGAAGAAAGGTTGAAGAC | ACT |
| 514012 | GTAGAGGATTGATTAGAACTGA | ACT |
| 1412827 | TTCTAACAGTGTATTTAATCATCA | ACT |
| 473834 | CAGAAGAGTCTCTGGGGAG | ACG |
| 480267 | ATTTTGTTTACCAAGAAGCCTC | ACT |
| 792329 | GACCATCCTGGCTAACA | ACG |
| 572180 | CTTATGCTCTTCTACCTCA | CGT |
| 1333029 | GTTGATTTGGTTAGCAATAAT | ACG |
| 485414 | AACATCCTAGGTCCTCT | ACT |
| 1412823 | CCTAATTAAGGGGAAGAAGAAG | CGT |
| 548881 | GGTTTTGCCTAATATATTTTGATG | ACG |
| 1412825 | GCGCCCGGAAAACCATGAT | ACT |
| 4422957 | CCGTTTACTTCTCATCTG | ACG |
| 944795 | CCTAACACCAAGTGTCC | ACT |
| 792310 | TTGGCTCCAGCAGGATC | ACG |
| 526736 | TTCCAGAATGTTACTTAAAAGA | CGT |
| 522042 | TAGCTCACTCCAAGCTC | ACG |
| 577367 | GCATTGTGGCCTCTGGCTA | ACG |
| 575754 | GGACATGGTCTCAGAAT | ACT |
| 573721 | GAAGCCTAAAAATGTGTAAAA | CGT |
| 487917 | CCATTGTAAAGTCCTAGCA | ACG |
| 792307 | TGCTGTCCATCATTGAG | ACG |
| 476350 | GGCAGGCAGATCACGAG | ACT |
| 571848 | AAAAGCAGTTTGATGTAGAG | ACT |
| 491623 | ACAGGTGATAAACAGTTTC | ACT |
| 956 | GTCAATATAAAAATTGGTAAAC | CGT |
| 520806 | AAGAGATTTCTCACAAATTGA | ACG |
| 522759 | CAGAATCCATGCATTGT | ACT |
| 545664 | GCTATTAGCCAGGCAGCAA | ACG |
| 545721 | GCTGCCTGGCTAATAGCTA | ACG |
| 536355 | CTGAGTATATGATGTAAG | ACG |
| 553044 | GTATGTAAACAGCAACTCTG | CGT |
| 581353 | GTCTAAAGATGTTCATCCC | ACT |

Genetic Analysis

[0292] Allelotyping results are shown for female (F) and male (M) cases and controls in Table 23 and Table 24, respectively. Allele frequency is noted in the fourth and fifth columns for melanoma pools and control pools, respectively.

TABLE 23
Females

| | | | | | | | Melanoma |
|---|---|---|---|---|---|---|---|
| dbSNP | Chromsome | | Female | Female | F p- | Odds | Associated |
| rs# | Position | Alleles | Case AF | Control AF | Value | Ratio | Allele |
| 956 | 74057383 | T/A | T = 0.613 | T = 0.642 | 0.428 | 1.13 | A |
| | | | A = 0.387 | A = 0.358 | | | |
| 471496 | 74068649 | G/A | G = 0.116 | G = 0.123 | 0.777 | 1.08 | A |
| | | | A = 0.884 | A = 0.877 | | | |
| 473834 | 74127777 | G/A | G = 0.143 | G = 0.192 | 0.082 | 1.43 | A |
| | | | A = 0.857 | A = 0.808 | | | |
| 474215 | 74084994 | T/C | T = 0.557 | T = 0.452 | 0.004 | 0.66 | T |
| | | | C = 0.443 | C = 0.548 | | | |
| 476350 | 74054050 | T/C | T = 0.031 | T = 0.035 | 0.887 | 1.14 | C |
| | | | C = 0.969 | C = 0.965 | | | |
| 477134 | 74063657 | T/G | T = 0.560 | T = 0.625 | 0.079 | 1.31 | G |
| | | | G = 0.440 | G = 0.375 | | | |
| 480267 | 74128467 | A/G | A = 0.318 | A = 0.356 | 0.306 | 1.19 | G |
| | | | G = 0.682 | G = 0.644 | | | |
| 481387 | 74095193 | C/T | C = 0.517 | C = 0.447 | 0.066 | 0.76 | C |
| | | | T = 0.483 | T = 0.553 | | | |
| 483259 | 74095372 | T/C | T = 0.581 | T = 0.666 | 0.024 | 1.44 | C |
| | | | C = 0.419 | C = 0.334 | | | |
| 485414 | 74134185 | A/G | A = 0.911 | A = 0.907 | 0.856 | 0.95 | A |
| | | | G = 0.089 | G = 0.093 | | | |
| 485929 | 74063028 | A/G | A = 0.716 | A = 0.718 | 0.949 | 1.01 | G |
| | | | G = 0.284 | G = 0.282 | | | |
| 487917 | 74053639 | C/T | C = 0.568 | C = 0.643 | 0.032 | 1.37 | T |
| | | | T = 0.432 | T = 0.357 | | | |
| 491623 | 74057217 | A/G | A = 0.622 | A = 0.529 | 0.014 | 0.68 | A |
| | | | G = 0.378 | G = 0.471 | | | |
| 492302 | 74084074 | G/C | G = | G = 0.389 | | | |
| | | | C = | C = 0.611 | | | |
| 495027 | 74067002 | A/C | A = 0.586 | A = 0.500 | 0.020 | 0.71 | A |
| | | | C = 0.414 | C = 0.500 | | | |
| 500203 | 74086394 | T/A | T = 0.508 | T = 0.425 | 0.025 | 0.72 | T |
| | | | A = 0.492 | A = 0.575 | | | |
| 503770 | 74120189 | T/C | T = 0.853 | T = 0.816 | 0.188 | 0.76 | T |
| | | | C = 0.147 | C = 0.184 | | | |
| 503904 | 74120248 | A/G | A = 0.838 | A = 0.810 | 0.338 | 0.82 | A |
| | | | G = 0.162 | G = 0.190 | | | |
| 504866 | 74069983 | C/T | C = 0.577 | C = 0.466 | 0.005 | 0.64 | C |
| | | | T = 0.423 | T = 0.534 | | | |
| 505634 | 74064394 | G/A | G = 0.923 | G = 0.946 | 0.337 | 1.46 | A |
| | | | A = 0.077 | A = 0.054 | | | |
| 514012 | 74121824 | A/G | A = 0.860 | A = 0.811 | 0.095 | 0.70 | A |
| | | | G = 0.140 | G = 0.189 | | | |
| 518574 | 74115781 | A/G | A = 0.974 | A = 0.970 | 0.823 | 0.85 | A |
| | | | G = 0.026 | G = 0.030 | | | |
| 518769 | 74084655 | A/G | A = 0.875 | A = 0.875 | 0.997 | 1.00 | G |
| | | | G = 0.125 | G = 0.125 | | | |
| 520806 | 74058084 | C/T | C = 0.586 | C = 0.644 | 0.103 | 1.28 | T |
| | | | T = 0.414 | T = 0.356 | | | |
| 522042 | 74051017 | G/A | G = 0.699 | G = | | | |
| | | | A = 0.301 | A = | | | |
| 522759 | 74058325 | T/C | T = 0.691 | T = 0.743 | 0.118 | 1.29 | C |
| | | | C = 0.309 | C = 0.257 | | | |
| 524252 | 74117340 | C/T | C = 0.829 | C = 0.827 | 0.945 | 0.99 | C |
| | | | T = 0.171 | T = 0.173 | | | |
| 524306 | 74066996 | T/A | T = 0.560 | T = 0.468 | 0.010 | 0.69 | T |
| | | | A = 0.440 | A = 0.532 | | | |
| 525358 | 74068047 | A/G | A = 0.150 | A = 0.141 | 0.763 | 0.93 | A |
| | | | G = 0.850 | G = 0.859 | | | |
| 526736 | 74050485 | A/T | A = 0.638 | A = 0.653 | 0.710 | 1.07 | T |
| | | | T = 0.362 | T = 0.347 | | | |
| 532221 | 74086693 | T/A | T = 0.726 | T = 0.784 | 0.066 | 1.37 | A |
| | | | A = 0.274 | A = 0.216 | | | |
| 532396 | 74071635 | T/C | T = 0.952 | T = 0.956 | 0.830 | 1.11 | C |
| | | | C = 0.048 | C = 0.044 | | | |
| 533371 | 74071755 | G/A | G = 0.528 | G = 0.484 | 0.214 | 0.84 | G |
| | | | A = 0.472 | A = 0.516 | | | |
| 536355 | 74058919 | G/A | G = 0.535 | G = 0.465 | 0.068 | 0.76 | G |
| | | | A = 0.465 | A = 0.535 | | | |
| 542136 | 74064603 | G/A | G = 0.626 | G = 0.525 | 0.011 | 0.66 | G |
| | | | A = 0.374 | A = 0.475 | | | |
| 545664 | 74058520 | G/A | G = 0.563 | G = 0.504 | 0.095 | 0.79 | G |
| | | | A = 0.437 | A = 0.496 | | | |
| 545680 | 74064983 | T/C | T = 0.686 | T = 0.719 | 0.324 | 1.17 | C |
| | | | C = 0.314 | C = 0.281 | | | |
| 545721 | 74058542 | C/T | C = 0.511 | C = 0.459 | 0.203 | 0.81 | C |
| | | | T = 0.489 | T = 0.541 | | | |
| 548881 | 74143288 | C/T | C = 0.899 | C = 0.863 | 0.224 | 0.71 | C |
| | | | T = 0.101 | T = 0.137 | | | |
| 553044 | 74059316 | G/T | G = 0.504 | G = 0.488 | 0.668 | 0.94 | G |
| | | | T = 0.496 | T = 0.512 | | | |
| 560808 | 74062976 | C/A | C = 0.567 | C = 0.640 | 0.046 | 1.36 | A |
| | | | A = 0.433 | A = 0.360 | | | |
| 567060 | 74073107 | A/G | A = 0.670 | A = 0.707 | 0.287 | 1.19 | G |
| | | | G = 0.330 | G = 0.293 | | | |
| 570631 | 74104598 | T/A | T = 0.376 | T = 0.350 | 0.575 | 0.90 | T |
| | | | A = 0.624 | A = 0.650 | | | |
| 571848 | 74056262 | A/G | A = 0.555 | A = 0.608 | 0.139 | 1.24 | G |
| | | | G = 0.445 | G = 0.392 | | | |
| 572180 | 74133942 | G/T | G = 0.869 | G = 0.838 | 0.259 | 0.78 | G |
| | | | T = 0.131 | T = 0.162 | | | |
| 573721 | 74052844 | G/T | G = 0.145 | G = 0.152 | 0.862 | 1.05 | T |
| | | | T = 0.855 | T = 0.848 | | | |
| 575754 | 74052571 | T/C | T = 0.923 | T = 0.938 | 0.510 | 1.25 | C |
| | | | C = 0.077 | C = 0.062 | | | |
| 575961 | 74065953 | C/T | C = | C = 0.948 | | | |
| | | | T = | T = 0.052 | | | |
| 576802 | 74109039 | T/A | T = 0.860 | T = 0.847 | 0.626 | 0.90 | T |
| | | | A = 0.140 | A = 0.153 | | | |
| 577367 | 74052429 | C/T | C = 0.540 | C = 0.461 | 0.037 | 0.73 | C |
| | | | T = 0.460 | T = 0.539 | | | |
| 581353 | 74060129 | A/G | A = 0.604 | A = 0.643 | 0.320 | 1.18 | G |
| | | | G = 0.396 | G = 0.357 | | | |
| 792307 | 74053743 | G/A | G = 0.530 | G = 0.617 | 0.020 | 1.43 | A |
| | | | A = 0.470 | A = 0.383 | | | |
| 792310 | 74050236 | G/A | G = 0.508 | G = 0.567 | 0.107 | 1.26 | A |
| | | | A = 0.492 | A = 0.433 | | | |
| 792321 | 74066711 | A/G | A = 0.645 | A = 0.676 | 0.421 | 1.15 | G |
| | | | G = 0.355 | G = 0.324 | | | |
| 792323 | 74092337 | C/T | C = 0.815 | C = 0.817 | 0.933 | 1.02 | T |
| | | | T = 0.185 | T = 0.183 | | | |
| 792324 | 74097814 | T/C | T = 0.068 | T = 0.052 | 0.533 | 0.76 | T |
| | | | C = 0.932 | C = 0.948 | | | |
| 792327 | 74103456 | G/A | G = 0.957 | G = 0.960 | 0.893 | 1.07 | A |
| | | | A = 0.043 | A = 0.040 | | | |
| 792328 | 74103887 | C/A | C = | C = 0.337 | | | |
| | | | A = | A = 0.663 | | | |
| 792329 | 74130625 | C/T | C = 0.732 | C = 0.744 | 0.688 | 1.07 | T |
| | | | T = 0.268 | T = 0.256 | | | |
| 944795 | 74049691 | C/G | C = 0.592 | C = 0.535 | 0.112 | 0.79 | C |
| | | | G = 0.408 | G = 0.465 | | | |
| 1333029 | 74134065 | G/A | G = 0.945 | G = 0.973 | 0.172 | 2.06 | A |
| | | | A = 0.055 | A = 0.027 | | | |
| 1412823 | 74134509 | A/T | A = 0.774 | A = 0.780 | 0.878 | 1.03 | T |
| | | | T = 0.226 | T = 0.220 | | | |
| 1412825 | 74048557 | G/C | G = 0.540 | G = 0.500 | 0.301 | 0.85 | G |
| | | | C = 0.460 | C = 0.500 | | | |
| 1412827 | 74122340 | A/G | A = 0.386 | A = 0.327 | 0.113 | 0.77 | A |
| | | | G = 0.614 | G = 0.673 | | | |
| 2027013 | 74120888 | T/G | T = 0.148 | T = 0.075 | 0.005 | 0.47 | T |
| | | | G = 0.852 | G = 0.925 | | | |
| 2034453 | 74096924 | A/G | A = 0.209 | A = 0.143 | 0.030 | 0.63 | A |
| | | | G = 0.791 | G = 0.857 | | | |
| 2039407 | 74119113 | A/T | A = 0.930 | A = 0.963 | 0.116 | 1.94 | T |
| | | | T = 0.070 | T = 0.037 | | | |
| 3753183 | 74083842 | G/T | G = 0.090 | G = 0.054 | 0.106 | 0.57 | G |
| | | | T = 0.910 | T = 0.946 | | | |
| 3765651 | 74094105 | A/C | A = 0.666 | A = 0.711 | 0.205 | 1.23 | C |
| | | | C = 0.334 | C = 0.289 | | | |
| 4422957 | 74048892 | C/T | C = 0.485 | C = 0.428 | 0.113 | 0.80 | C |
| | | | T = 0.515 | T = 0.572 | | | |
| 4593767 | 74107836 | G/A | G = 0.231 | G = 0.270 | 0.221 | 1.23 | A |
| | | | A = 0.769 | A = 0.730 | | | |

[0293] TABLE 24
Males

| | | | | | | | Melanoma |
|---|---|---|---|---|---|---|---|
| dbSNP | Chromsome | | Male Case | Male | M p- | Odds | Associated |
| rs# | Position | Alleles | AF | Control AF | Value | Ratio | Allele |
| 956 | 74057383 | T/A | T = 0.625 | T = 0.627 | 0.951 | 1.01 | A |
| | | | A = 0.375 | A = 0.373 | | | |
| 471496 | 74068649 | G/A | G = 0.097 | G = 0.097 | 0.976 | 0.99 | G |
| | | | A = 0.903 | A = 0.903 | | | |
| 473834 | 74127777 | G/A | G = 0.179 | G = 0.185 | 0.826 | 1.04 | A |
| | | | A = 0.821 | A = 0.815 | | | |
| 474215 | 74084994 | T/C | T = 0.486 | T = 0.434 | 0.162 | 0.81 | T |
| | | | C = 0.514 | C = 0.566 | | | |
| 476350 | 74054050 | T/C | T = 0.053 | T = 0.047 | 0.799 | 0.88 | T |
| | | | C = 0.947 | C = 0.953 | | | |
| 477134 | 74063657 | T/G | T = 0.587 | T = 0.613 | 0.490 | 1.11 | G |
| | | | G = 0.413 | G = 0.387 | | | |
| 480267 | 74128467 | A/G | A = 0.333 | A = 0.365 | 0.467 | 1.15 | G |
| | | | G = 0.667 | G = 0.635 | | | |
| 481387 | 74095193 | C/T | C = 0.480 | C = 0.463 | 0.645 | 0.93 | C |
| | | | T = 0.520 | T = 0.537 | | | |
| 483259 | 74095372 | T/C | T = 0.637 | T = 0.661 | 0.506 | 1.11 | C |
| | | | C = 0.363 | C = 0.339 | | | |
| 485414 | 74134185 | A/G | A = 0.897 | A = 0.923 | 0.318 | 1.37 | G |
| | | | G = 0.103 | G = 0.077 | | | |
| 485929 | 74063028 | A/G | A = 0.693 | A = 0.715 | 0.515 | 1.11 | G |
| | | | G = 0.307 | G = 0.285 | | | |
| 487917 | 74053639 | C/T | C = 0.629 | C = 0.685 | 0.180 | 1.28 | T |
| | | | T = 0.371 | T = 0.315 | | | |
| 491623 | 74057217 | A/G | A = 0.577 | A = 0.565 | 0.778 | 0.95 | A |
| | | | G = 0.423 | G = 0.435 | | | |
| 492302 | 74084074 | G/C | G = | G = | | | |
| | | | C = | C = | | | |
| 495027 | 74067002 | A/C | A = 0.563 | A = 0.501 | 0.104 | 0.78 | A |
| | | | C = 0.437 | C = 0.499 | | | |
| 500203 | 74086394 | T/A | T = 0.453 | T = 0.423 | 0.416 | 0.89 | T |
| | | | A = 0.547 | A = 0.577 | | | |
| 503770 | 74120189 | T/C | T = 0.824 | T = 0.826 | 0.942 | 1.02 | C |
| | | | C = 0.176 | C = 0.174 | | | |
| 503904 | 74120248 | A/G | A = 0.814 | A = 0.809 | 0.891 | 0.97 | A |
| | | | G = 0.186 | G = 0.191 | | | |
| 504866 | 74069983 | C/T | C = 0.605 | C = 0.507 | 0.040 | 0.67 | C |
| | | | T = 0.395 | T = 0.493 | | | |
| 505634 | 74064394 | G/A | G = 0.939 | G = 0.948 | 0.714 | 1.18 | A |
| | | | A = 0.061 | A = 0.052 | | | |
| 514012 | 74121824 | A/G | A = 0.821 | A = 0.801 | 0.516 | 0.88 | A |
| | | | G = 0.179 | G = 0.199 | | | |
| 518574 | 74115781 | A/G | A = 0.966 | A = 0.969 | 0.883 | 1.09 | G |
| | | | G = 0.034 | G = 0.031 | | | |
| 518769 | 74084655 | A/G | A = 0.874 | A = 0.871 | 0.921 | 0.97 | A |
| | | | G = 0.126 | G = 0.129 | | | |
| 520806 | 74058084 | C/T | C = 0.631 | C = 0.664 | 0.358 | 1.16 | T |
| | | | T = 0.369 | T = 0.336 | | | |
| 522042 | 74051017 | G/A | G = | G = | | | |
| | | | A = | A = | | | |
| 522759 | 74058325 | T/C | T = 0.724 | T = 0.752 | 0.406 | 1.15 | C |
| | | | C = 0.276 | C = 0.248 | | | |
| 524252 | 74117340 | C/T | C = 0.839 | C = 0.840 | 0.963 | 1.01 | T |
| | | | T = 0.161 | T = 0.160 | | | |
| 524306 | 74066996 | T/A | T = 0.518 | T = 0.478 | 0.298 | 0.85 | T |
| | | | A = 0.482 | A = 0.522 | | | |
| 525358 | 74068047 | A/G | A = 0.127 | A = 0.133 | 0.847 | 1.05 | G |
| | | | G = 0.873 | G = 0.867 | | | |
| 526736 | 74050485 | A/T | A = 0.588 | A = | | | |
| | | | T = 0.412 | T = | | | |
| 532221 | 74086693 | T/A | T = 0.723 | T = 0.822 | 0.002 | 1.77 | A |
| | | | A = 0.277 | A = 0.178 | | | |
| 532396 | 74071635 | T/C | T = 0.961 | T = 0.971 | 0.676 | 1.36 | C |
| | | | C = 0.039 | C = 0.029 | | | |
| 533371 | 74071755 | G/A | G = 0.510 | G = 0.511 | 0.995 | 1.00 | A |
| | | | A = 0.490 | A = 0.489 | | | |
| 536355 | 74058919 | G/A | G = | G = 0.502 | | | |
| | | | A = | A = 0.498 | | | |
| 542136 | 74064603 | G/A | G = | G = 0.552 | | | |
| | | | A = | A = 0.448 | | | |
| 545664 | 74058520 | G/A | G = 0.534 | G = 0.525 | 0.810 | 0.96 | G |
| | | | A = 0.466 | A = 0.475 | | | |
| 545680 | 74064983 | T/C | T = 0.708 | T = 0.715 | 0.837 | 1.04 | C |
| | | | C = 0.292 | C = 0.285 | | | |
| 545721 | 74058542 | C/T | C = 0.535 | C = 0.480 | 0.215 | 0.80 | C |
| | | | T = 0.465 | T = 0.520 | | | |
| 548881 | 74143288 | C/T | C = 0.921 | C = 0.899 | 0.434 | 0.76 | C |
| | | | T = 0.079 | T = 0.101 | | | |
| 553044 | 74059316 | G/T | G = 0.471 | G = 0.490 | 0.624 | 1.08 | T |
| | | | T = 0.529 | T = 0.510 | | | |
| 560808 | 74062976 | C/A | C = 0.593 | C = 0.614 | 0.562 | 1.09 | A |
| | | | A = 0.407 | A = 0.386 | | | |
| 567060 | 74073107 | A/G | A = 0.699 | A = 0.698 | 0.968 | 0.99 | A |
| | | | G = 0.301 | G = 0.302 | | | |
| 570631 | 74104598 | T/A | T = 0.385 | T = 0.373 | 0.786 | 0.95 | T |
| | | | A = 0.615 | A = 0.627 | | | |
| 571848 | 74056262 | A/G | A = 0.601 | A = 0.603 | 0.950 | 1.01 | G |
| | | | G = 0.399 | G = 0.397 | | | |
| 572180 | 74133942 | G/T | G = 0.845 | G = 0.851 | 0.834 | 1.05 | T |
| | | | T = 0.155 | T = 0.149 | | | |
| 573721 | 74052844 | G/T | G = 0.095 | G = 0.137 | 0.247 | 1.52 | T |
| | | | T = 0.905 | T = 0.863 | | | |
| 575754 | 74052571 | T/C | T = 0.929 | T = 0.947 | 0.429 | 1.36 | C |
| | | | C = 0.071 | C = 0.053 | | | |
| 575961 | 74065953 | C/T | C = | C = 0.963 | | | |
| | | | T = | T = 0.037 | | | |
| 576802 | 74109039 | T/A | T = 0.834 | T = 0.865 | 0.266 | 1.28 | A |
| | | | A = 0.166 | A = 0.135 | | | |
| 577367 | 74052429 | C/T | C = 0.540 | C = | | | |
| | | | T = 0.460 | T = | | | |
| 581353 | 74060129 | A/G | A = 0.633 | A = 0.647 | 0.681 | 1.07 | G |
| | | | G = 0.367 | G = 0.353 | | | |
| 792307 | 74053743 | G/A | G = 0.592 | G = 0.654 | 0.128 | 1.30 | A |
| | | | A = 0.408 | A = 0.346 | | | |
| 792310 | 74050236 | G/A | G = 0.548 | G = 0.565 | 0.653 | 1.07 | A |
| | | | A = 0.452 | A = 0.435 | | | |
| 792321 | 74066711 | A/G | A = 0.667 | A = 0.673 | 0.877 | 1.03 | G |
| | | | G = 0.333 | G = 0.327 | | | |
| 792323 | 74092337 | C/T | C = 0.820 | C = 0.825 | 0.892 | 1.03 | T |
| | | | T = 0.180 | T = 0.175 | | | |
| 792324 | 74097814 | T/C | T = 0.070 | T = 0.061 | 0.701 | 0.86 | T |
| | | | C = 0.930 | C = 0.939 | | | |
| 792327 | 74103456 | G/A | G = 0.963 | G = 0.978 | 0.477 | 1.72 | A |
| | | | A = 0.037 | A = 0.022 | | | |
| 792328 | 74103887 | C/A | C = | C = | | | |
| | | | A = | A = | | | |
| 792329 | 74130625 | C/T | C = 0.754 | C = 0.756 | 0.951 | 1.01 | T |
| | | | T = 0.246 | T = 0.244 | | | |
| 944795 | 74049691 | C/G | C = 0.554 | C = 0.540 | 0.722 | 0.95 | C |
| | | | G = 0.446 | G = 0.460 | | | |
| 1333029 | 74134065 | G/A | G = 0.962 | G = | | | |
| | | | A = 0.038 | A = | | | |
| 1412823 | 74134509 | A/T | A = 0.762 | A = 0.761 | 0.993 | 1.00 | A |
| | | | T = 0.238 | T = 0.239 | | | |
| 1412825 | 74048557 | G/C | G = 0.521 | G = 0.518 | 0.953 | 0.99 | G |
| | | | C = 0.479 | C = 0.482 | | | |
| 1412827 | 74122340 | A/G | A = 0.365 | A = 0.388 | 0.572 | 1.10 | G |
| | | | G = 0.635 | G = 0.612 | | | |
| 2027013 | 74120888 | T/G | T = 0.093 | T = | | | |
| | | | G = 0.907 | G = | | | |
| 2034453 | 74096924 | A/G | A = 0.173 | A = 0.151 | 0.506 | 0.85 | A |
| | | | G = 0.827 | G = 0.849 | | | |
| 2039407 | 74119113 | A/T | A = 0.946 | A = 0.944 | 0.931 | 0.96 | A |
| | | | T = 0.054 | T = 0.056 | | | |
| 3753183 | 74083842 | G/T | G = 0.081 | G = 0.041 | 0.075 | 0.49 | G |
| | | | T = 0.919 | T = 0.959 | | | |
| 3765651 | 74094105 | A/C | A = 0.704 | A = 0.704 | 0.998 | 1.00 | A |
| | | | C = 0.296 | C = 0.296 | | | |
| 4422957 | 74048892 | C/T | C = 0.462 | C = 0.450 | 0.757 | 0.96 | C |
| | | | T = 0.538 | T = 0.550 | | | |
| 4593767 | 74107836 | G/A | G = 0.300 | G = 0.260 | 0.269 | 0.82 | G |
| | | | A = 0.700 | A = 0.740 | | | |

[0294] Allelotyping results were considered significant with a calculated p-value of less than or equal to 0.05 for allelotype results. These values are indicated in bold. The assay failed for those SNPs in which the allele frequency is blank. The combined allelotyping p-values for males and females were plotted in FIG. 18 and separately for females and males in FIGS. 19 and 20, respectively. The position of each SNP on the chromosome is presented on the x-axis. The y-axis gives the negative logarithm (base 10) of the p-value comparing the estimated allele in the case group to that of the control group. The minor allele frequency of the control group for each SNP designated by an X or other symbol on the graphs in FIGS. 18, 19 and 20 can be determined by consulting Table 23 or 24. By proceeding down the Table from top to bottom and across the graphs from left to right the allele frequency associated with each symbol shown can be determined.

[0295] To aid the interpretation, multiple lines have been added to the graph. The broken horizontal lines are drawn at two common significance levels, 0.05 and 0.01. The vertical broken lines are drawn every 20 kb to assist in the interpretation of distances between SNPs. Two other lines are drawn to expose linear trends in the association of SNPs to the disease. The light gray line (or generally bottom-most curve) is a nonlinear smoother through the data points on the graph using a local polynomial regression method (W. S. Cleveland, E. Grosse and W. M. Shyu (1992) Local regression models. Chapter 8 of Statistical Models in S eds J. M. Chambers and T. J. Hastie, Wadsworth & Brooks/Cole.). The black line (or generally top-most curve, e.g., see peak in left-most graph just to the left of position 92150000) provides a local test for excess statistical significance to identify regions of association. This was created by use of a 10 kb sliding window with 1 kb step sizes. Within each window, a chi-square goodness of fit test was applied to compare the proportion of SNPs that were significant at a test wise level of 0.01, to the proportion that would be expected by chance alone (0.05 for the methods used here). Resulting p-values that were less than 10⁻⁸ were truncated at that value.

[0296] Finally, the exons and introns of the genes in the covered region are plotted below each graph at the appropriate chromosomal positions. The gene boundary is indicated by the broken horizontal line. The exon positions are shown as thick, unbroken bars. An arrow is place at the 3′ end of each gene to show the direction of transcription.

### Example 8

Inhibition of CDK10 Gene Expression by Transfection of Specific siRNAs

[0297] RNAi-based gene inhibition was selected as an effective way to inhibit expression of CDK10 in cultured cells. Algorithms useful for designing siRNA molecules specific for the CDK10 targets are disclosed at the http address www.dhramacon.com. siRNAs were selected from this list for use in RNAi experiments following a filtering protocol that involved the removal of any siRNA with complementarity to common motifs or domains present in any target as well as siRNAs complementary to sequences containing SNPs. From this filtered set of siRNAs, four were selected that showed no off-target homology following BLAST analysis against various Genbank nucleotide databases. Table 25 summarizes the features of the duplexes that were ordered from Dharmacon Research, Inc., and subsequently used as a cocktail in the assays described herein to inhibit expression of CDK10. A non-homologous siRNA reagent was used as a negative control.

TABLE 25

CDK10 siRNAs used for cell transfection

| | siRNA | Sequence | |
|---|---|---|---|
| siRNA | Target | Specificity | SEQ ID NO: |
| CDK10_59 | CDK10 | GATCCGTCTGAAGTGTATT | |
| CDK10_149 | CDK10 | GAAGCTGAACCGCATTGGA | |
| CDK10_175 | CDK10 | CCTACGGCATTGTGTATCG | |
| CDK10_532 | CDK10 | ACTTGCTCATGACCGACAA | |

[0298] Two melanoma cell lines (M14 and A375) were selected for RNAi experiments. On day 1, cells were transfected with siRNA cocktails (18.75 nM) using LIPOFECTAMINE 2000 (LF2000™) Reagent. On days 1, 3 & 6, cellular proliferation was measured using the WST-1 assay (Roche, catalog #1 644 807). Briefly, the WST-1 assay is a colorimetric assay used to determine cellular proliferation by measuring the cleavage of WST-1 by mitochondrial dehydrogenases in living cells. By measuring absorbance, a highly accurate measure of cellular proliferation is obtained. On day 1, WST-1 reagent was added to each well and allowed to incubate for 3-4 h. Subsequently, absorbance was measured at 450 nm and 620 nm using a Tecan Ultra plate reader. This process was repeated on day's 3 and 6. The extent of proliferation on days 3 and 6 were calculated relative to day 1, based on absorbance readings for each sample on each day. From the triplicate repeats of each time point, means and standard deviations were calculated and the effect of siRNA inhibition of each target on cellular proliferation was assessed and compared to cells transfected with a positive control siRNA (siRAD21_{—}1175) and a negative control siRNA (siLuciferase GL2). All experiments were performed in duplicate.

### Example 9

Cell Proliferation

[0299] The siRNAs from Example 8 were transfected in cell lines grown in 6-well plates. Cells were trypsinized on the following day and distributed into 96-well plates. Wst-1 reagent was added on the indicated days and the absorbance at 650 nm and 450 nm was measured. The difference in absorbance between these 2 wavelengths is an indication of the metabolic activity in each well that was measured. Metabolic activity is directly proportional to the number of cells in each well.

[0300] Suppression of target mRNA levels correlated with decreased cell proliferation as seen in A375 melanoma cells. See FIG. 21.

### Example 10

Screening Assay to Detect Modulators of CDK10

[0301] The following is an exemplary assay for finding modulators of CDK10. CDK10 may be screened using, for example, the non-radioactive IMAP system available from Molecular Devices, Sunnyvale Calif. 94089, according to the manufacturers instructions. The ability of a given compound to modulate activity of the kinase is determined by comparison of fluorescence polarization values in the IMAP assay in the presence of the compound with values obtained in solvent controls. Preferably, the test compound should produce a result that differs by at least 3 standard deviations from a set of at least 30 replicate control samples. More specifically, IMAP is a technology that uses the specific binding of metal (M III) coordination complexes to phosphate groups at high salt concentration and a fluorescence polarization readout. In a microwell assay format, fluorescently labeled peptides are phosphorylated in a kinase reaction. After the reaction, proprietary IMAP nanoparticles derivatized with metal (M^{III}) coordination complexes are added to the assay to bind the phosphorylated peptides. The binding causes a change in the motion of the peptide, and results in an increase in the observed fluorescence polarization. This assay, unlike antibody-based homogeneous kinase assays, is applicable to a wide variety of tyrosine and serine/threonine kinases. IMAP technology is largely independent of the sequence of the substrate peptides. In addition, the technology is useful in assays of phosphodiesterases and phosphatases. In a typical reaction on a 384-well plate the following would be combined: 10 ul of the kinase in question, 5 ul of test compound, 5 ul of substrate, such as Myelin Basic Protein Fragment 4-14 (MDL Number MFCD00133371; CAS Number 126768-94-3) or a similarly-sized peptide, at a concentration of 30-1000 nM; and ATP at a concentration of 1-30 ul. The substrate may be labeled with a fluorophore such as fluorescein-5-isothiocyanate (FITC Isomer 1). These reagents would be allowed to react at room temperature for one hour. Then 60 ul of IMAP binding reagent is added and the fluorescence polarization is read.

### Example 11

Screening Assay to Detect Modulators of CARK

[0302] The following is an exemplary assay for finding modulators of CARK. CARK may be screened using, for example, the non-radioactive IMAP system available from Molecular Devices, Sunnyvale Calif. 94089, according to the manufacturers instructions. The ability of a given compound to modulate activity of the kinase is determined by comparison of fluorescence polarization values in the IMAP assay in the presence of the compound with values obtained in solvent controls. Preferably, the test compound should produce a result that differs by at least 3 standard deviations from a set of at least 30 replicate control samples. More specifically, IMAP is a technology that uses the specific binding of metal (M III) coordination complexes to phosphate groups at high salt concentration and a fluorescence polarization readout. In a microwell assay format, fluorescently labeled peptides are phosphorylated in a kinase reaction. After the reaction, proprietary IMAP nanoparticles derivatized with metal (M^{III}) coordination complexes are added to the assay to bind the phosphorylated peptides. The binding causes a change in the motion of the peptide, and results in an increase in the observed fluorescence polarization. This assay, unlike antibody-based homogeneous kinase assays, is applicable to a wide variety of tyrosine and serine/threonine kinases. IMAP technology is largely independent of the sequence of the substrate peptides. In addition, the technology is useful in assays of phosphodiesterases and phosphatases. In a typical reaction on a 384-well plate the following would be combined: 10 ul of the kinase in question, 5 ul of test compound, 5 ul of substrate, such as Myelin Basic Protein Fragment 4-14 (MDL Number MFCD00133371; CAS Number 126768-94-3) or a similarly-sized peptide, at a concentration of 30-1000 nM; and ATP at a concentration of 1-30 ul. The substrate may be labeled with a fluorophore such as fluorescein-5-isothiocyanate (FITC Isomer I). These reagents would be allowed to react at room temperature for one hour. Then 60 ul of IMAP binding reagent is added and the fluorescence polarization is read.

### Example 12

Screening Assay to Detect Modulators of FPGT

[0303] The following is an exemplary assay for finding modulators of FPGT. Incubate enzyme plus test sample plus substrates (fucose-1-phosphate and alpha-33P GTP (Amersham)) under conditions described (Pastuszak, I., Ketchum, C., Hermanson, G., Sjoberg, E. J., Drake, R. and Elbein, A. D. GDP-L-fucose pyrophosphorylase. Purification, cDNA cloning, and properties of the enzyme J. Biol. Chem. 273 (46), 30165-30174 (1998)). Add to the reaction mixture streptavidin coated scintillation proximity beads (Amersham) precoated with biotinylated lotus lectin (Vector Labs, Burlingame Calif. 94010). Measure bead-associated radioactivity by scintillation counting. The ability of a given compound to modulate activity of the enzyme is determined by comparison of bead-bound radioactivity in the presence of the compound with values obtained in solvent controls. Preferably, the test compound should produce a result that differs by at least 3 standard deviations from a set of at least 30 replicate control samples.

### Example 13

In Vitro Production of Target Polypeptides

[0304] Target polypeptides encoded by the polynucleotides provided in Figured 1-7 may be produced by the methods described herein.

[0305] cDNA is cloned into a pIVEX 2.3-MCS vector (Roche Biochem) using a directional cloning method. A cDNA insert is prepared using PCR with forward and reverse primers having 5′ restriction site tags (in frame) and 5-6 additional nucleotides in addition to 3′ gene-specific portions, the latter of which is typically about twenty to about twenty-five base pairs in length. A Sal I restriction site is introduced by the forward primer and a Sma I restriction site is introduced by the reverse primer. The ends of PCR products are cut with the corresponding restriction enzymes (i.e., Sal I and Sma I) and the products are gel-purified. The pIVEX 2.3-MCS vector is linearized using the same restriction enzymes, and the fragment with the correct sized fragment is isolated by gel-purification. Purified PCR product is ligated into the linearized pIVEX 2.3-MCS vector and E. coli cells transformed for plasmid amplification. The newly constructed expression vector is verified by restriction mapping and used for protein production.

[0306] E. coli lysate is reconstituted with 0.25 ml of Reconstitution Buffer, the Reaction Mix is reconstituted with 0.8 ml of Reconstitution Buffer; the Feeding Mix is reconstituted with 10.5 ml of Reconstitution Buffer; and the Energy Mix is reconstituted with 0.6 ml of Reconstitution Buffer. 0.5 ml of the Energy Mix was added to the Feeding Mix to obtain the Feeding Solution. 0.75 ml of Reaction Mix, 50 μl of Energy Mix, and 10 μg of the template DNA is added to the E. coli lysate.

[0307] Using the reaction device (Roche Biochem), 1 ml of the Reaction Solution is loaded into the reaction compartment. The reaction device is turned upside-down and 10 ml of the Feeding Solution is loaded into the feeding compartment. All lids are closed and the reaction device is loaded into the RTS500 instrument. The instrument is run at 30° C. for 24 hours with a stir bar speed of 150 rpm. The pIVEX 2.3 MCS vector includes a nucleotide sequence that encodes six consecutive histidine amino acids on the C-terminal end of the target polypeptide for the purpose of protein purification target polypeptide is purified by contacting the contents of reaction device with resin modified with Ni²⁺ ions. target polypeptide is eluted from the resin with a solution containing free Ni²⁺ ions.

### Example 14

Cellular Production of Target Polypeptides

[0308] Nucleic acids are cloned into DNA plasmids having phage recombination cites and target polypeptides are expressed therefrom in a variety of host cells. Alpha phage genomic DNA contains short sequences known as attP sites, and E. coli genomic DNA contains unique, short sequences known as attB sites. These regions share homology, allowing for integration of phage DNA into E. coli via directional, site-specific recombination using the phage protein Int and the E. coli protein IHF. Integration produces two new att sites, L and R, which flank the inserted prophage DNA. Phage excision from E. coli genomic DNA can also be accomplished using these two proteins with the addition of a second phage protein, Xis. DNA vectors have been produced where the integration/excision process is modified to allow for the directional integration or excision of a target DNA fragment into a backbone vector in a rapid in vitro reaction (Gateway™ Technology (Invitrogen, Inc.)).

[0309] A first step is to transfer the nucleic acid insert into a shuttle vector that contains attL sites surrounding the negative selection gene, ccdB (e.g. pENTER vector, Invitrogen, Inc.). This transfer process is accomplished by digesting the nucleic acid from a DNA vector used for sequencing, and to ligate it into the multicloning site of the shuttle vector, which will place it between the two attL sites while removing the negative selection gene ccdB. A second method is to amplify the nucleic acid by the polymerase chain reaction (PCR) with primers containing attB sites. The amplified fragment then is integrated into the shuttle vector using Int and IHF. A third method is to utilize a topoisomerase-mediated process, in which the nucleic acid is amplified via PCR using gene-specific primers with the 5′ upstream primer containing an additional CACC sequence (e.g., TOPO® expression kit (Invitrogen, Inc.)). In conjunction with Topoisomerase I, the PCR amplified fragment can be cloned into the shuttle vector via the attL sites in the correct orientation.

[0310] Once the nucleic acid is transferred into the shuttle vector, it can be cloned into an expression vector having attR sites. Several vectors containing attR sites for expression of target polypeptide as a native polypeptide, N-fusion polypeptide, and C-fusion polypeptides are commercially available (e.g., pDEST (Invitrogen, Inc.)), and any vector can be converted into an expression vector for receiving a nucleic acid from the shuttle vector by introducing an insert having an attR site flanked by an antibiotic resistant gene for selection using the standard methods described above. Transfer of the nucleic acid from the shuttle vector is accomplished by directional recombination using Int, IHF, and Xis (LR clonase). Then the desired sequence can be transferred to an expression vector by carrying out a one hour incubation at room temperature with nt, IHF, and Xis, a ten minute incubation at 37° C. with proteinase K, transforming bacteria and allowing expression for one hour, and then plating on selective media. Generally, 90% cloning efficiency is achieved by this method. Examples of expression vectors are pDEST 14 bacterial expression vector with att7 promoter, pDEST 15 bacterial expression vector with a T7 promoter and a N-terminal GST tag, pDEST 17 bacterial vector with a 17 promoter and a N-terminal polyhistidine affinity tag, and pDEST 12.2 mammalian expression vector with a CMV promoter and neo resistance gene. These expression vectors or others like them are transformed or transfected into cells for expression of the target polypeptide or polypeptide variants. These expression vectors are often transfected, for example, into murine-transformed cell lines (e.g., adipocyte cell line 3T3-L1, (ATCC), human embryonic kidney cell line 293, and rat cardiomyocyte cell line H9C2).

[0311] Modifications may be made to the foregoing without departing from the basic aspects of the invention. Although the invention has been described in substantial detail with reference to one or more specific embodiments, those of skill in the art will recognize that changes may be made to the embodiments specifically disclosed in this application, yet these modifications and improvements are within the scope and spirit of the invention, as set forth in the claims which follow. Also, citation of the above publications or documents is not intended as an admission that any of the foregoing is pertinent prior art, nor does it constitute any admission as to the contents or date of these publications or documents. U.S. patents and other publications and documents referenced are incorporated herein by reference.

1. A method for identifying a subject at risk of melanoma, which comprises detecting the presence or absence of one or more polymorphic variations associated with melanoma in a nucleic acid sample from a subject, wherein the polymorphic variation is detected in a nucleotide sequence selected from the group consisting of
(a) the nucleotide sequence of SEQ ID NO: 1, 2, 3 or 4;
(b) a nucleotide sequence which encodes a polypeptide consisting of the amino acid sequence encoded by the nucleotide sequence of SEQ ID NO: 1, 2, 3 or 4;
(c) a nucleotide sequence which encodes a polypeptide that is 90% or more identical to the amino acid sequence encoded by the nucleotide sequence of SEQ ID NO: 1, 2, 3 or 4; and
(d) a fragment of a nucleotide sequence of (a), (b), or (c);
whereby the presence of the polymorphic variation is indicative of the subject being at risk of melanoma.

2. The method of claim 1, which further comprises obtaining the nucleic acid sample from the subject.

3. The method of claim 1, wherein the one or more polymorphic variations are detected at one or more positions in SEQ ID NO: 1 selected from the group consisting of 139, 3525, 7960, 9640, 14845, 19300, 21338, 21343, 42477, 43164, 43734, 44029, 44986, 53410, 83831, 85666, 88389 and 92523.

4. The method of claim 1, wherein the one or more polymorphic variations are detected at one or more positions in SEQ ID NO: 2 selected from the group consisting of 17207, 19057, 32252, 33887, 36394, 39184, 40707, 42857, 45812, 46643, 47007, 50015, 50442, 51203, 51983, 57523, 60557, 60645, 64531 and 83870.

5. The method of claim 1, wherein the one or more polymorphic variations are detected at one or more positions in SEQ ID NO: 3 selected from the group consisting of 4029, 5343, 8817, 18596, 18602, 21583, 36594, 37994, 38293, 46972, 48524 and 72488.

6. The method of claim 1, wherein a polymorphic variation is detected at position 38753 in SEQ ID NO: 4.

7. The method of claim 3, wherein one or more polymorphic variations are detected at one or more positions in linkage disequilibrium with one or more nucleotides at positions in SEQ ID NO: 1 selected from the group consisting of 139, 3525, 7960, 9640, 14845, 19300, 21338, 21343, 42477, 43164, 43734, 44029, 44986, 53410, 83831, 85666, 88389 and 92523.

8. The method of claim 4, wherein the one or more polymorphic variations are detected at one or more positions in linkage disequilibrium with one or more nucleotides at positions in SEQ ID NO: 2 selected from the group consisting of 17207, 19057, 32252, 33887, 36394, 39184, 40707, 42857, 45812, 46643, 47007, 50015, 50442, 51203, 51983, 57523, 60557, 60645, 64531 and 83870.

9. The method of claim 5, wherein one or more polymorphic variations are detected at one or more positions in linkage disequilibrium with one or more nucleotides at positions in SEQ ID NO: 3 selected from the group consisting of 4029, 5343, 8817, 18596, 18602, 21583, 36594, 37994, 38293, 46972, 48524 and 72488.

10. The method of claim 6, wherein one or more polymorphic variations are detected at one or more positions in linkage disequilibrium with a nucleotide at position 38753 in SEQ ID NO: 4.

11. The method of claim 1, wherein detecting the presence or absence of the one or more polymorphic variations comprises:
hybridizing an oligonucleotide to the nucleic acid sample, wherein the oligonucleotide is complementary to a nucleotide sequence in the nucleic acid and hybridizes to a region adjacent to the polymorphic variation;
extending the oligonucleotide in the presence of one or more nucleotides, yielding extension products; and detecting the presence or absence of a polymorphic variation in the extension products.

12. The method of claim 1, wherein the subject is a human.

13. A method for identifying a polymorphic variation associated with melanoma proximal to an incident polymorphic variation associated with melanoma, which comprises:
identifying a polymorphic variation proximal to the incident polymorphic variation associated with melanoma, wherein the polymorphic variation is detected in a nucleotide sequence selected from the group consisting of:
(a) the nucleotide sequence of SEQ ID NO: 1, 2, 3 or 4;
(b) a nucleotide sequence which encodes a polypeptide consisting of the amino acid sequence encoded by the nucleotide sequence of SEQ ID NO: 1, 2, 3 or 4;
(c) a nucleotide sequence which encodes a polypeptide that is 90% or more identical to the amino acid sequence encoded by the nucleotide sequence of SEQ ID NO: 1, 2, 3 or 4; and
(d) a fragment of a nucleotide sequence of (a), (b), or (c) comprising the polymorphic variation;
determining the presence or absence of an association of the proximal polymorphic variant with melanoma.

14. The method of claim 13, wherein the incident polymorphic variation is at a position in SEQ ID NO: 1 selected from the group consisting of 139, 3525, 7960, 9640, 14845, 19300, 21338, 21343, 42477, 43164, 43734, 44029, 44986, 53410, 83831, 85666, 88389 and 92523.

15. The method of claim 13, wherein the incident polymorphic variation is at a position in SEQ ID NO: 2 selected from the group consisting of 17207, 19057, 32252, 33887, 36394, 39184, 40707, 42857, 45812, 46643, 47007, 50015, 50442, 51203, 51983, 57523, 60557, 60645, 64531 and 83870.

16. The method of claim 13, wherein the incident polymorphic variation is at a position in SEQ ID NO: 3 selected from the group consisting of 4029, 5343, 8817, 18596, 18602, 21583, 36594, 37994, 38293, 46972, 48524 and 72488.

17. The method of claim 13, wherein the incident polymorphic variation is at position 38753 in SEQ ID NO: 4.

18. The method of claim 13, wherein the proximal polymorphic variation is within a region between about 5 kb 5′ of the incident polymorphic variation and about 5 kb 3′ of the incident polymorphic variation.

19. The method of claim 13, which further comprises determining whether the proximal polymorphic variation is in linkage disequilibrium with the incident polymorphic variation.

20. The method of claim 13, which further comprises identifying a second polymorphic variation proximal to the identified proximal polymorphic variation associated with melanoma and determining if the second proximal polymorphic variation is associated with melanoma.

21. The method of claim 20, wherein the second proximal polymorphic variant is within a region between about 5 kb 5′ of the incident polymorphic variation and about 5 kb 3′ of the proximal polymorphic variation associated with melanoma.

22. An isolated nucleic acid comprising a nucleotide sequence selected from the group consisting of:
(a) the nucleotide sequence of SEQ ID NO: 1, 2, 3 or 4;
(b) a nucleotide sequence which encodes a polypeptide consisting of the amino acid sequence encoded by the nucleotide sequence of SEQ ID NO: 1, 2, 3 or 4;
(c) a nucleotide sequence which encodes a polypeptide that is 90% or more identical to the amino acid sequence encoded by the nucleotide sequence of SEQ ID NO: 1, 2, 3 or 4; and
(d) a fragment of a nucleotide sequence of (a), (b), or (c); and
(e) a nucleotide sequence complementary to the nucleotide sequences of (a), (b), (c), or (d);
wherein the nucleotide sequence comprises one or more nucleotides selected from the group consisting of a cytosine at position 139 in SEQ ID NO: 1, a guanine at position 3525 in SEQ ID NO: 1, a thymine at position 7960 in SEQ ID NO: 1, a guanine at position 9640 in SEQ ID NO: 1, a thymine at position 14845 in SEQ ID NO: 1, a cytosine at position 19300 in SEQ ID NO: 1, a cytosine at position 21338 in SEQ ID NO: 1, a thymine at position 21343 in SEQ ID NO: 1, a guanine at position 42477 in SEQ ID NO: 1, a thymine at position 43164 in SEQ ID NO: 1, a thymine at position 43734 in SEQ ID NO: 1, an adenine at position 44029 in SEQ ID NO: 1, a thymine at position 44986 in SEQ ID NO: 1, a guanine at position 53410 in SEQ ID NO: 1, a cytosine at position 83831 in SEQ ID NO: 1, a cytosine at position 85666 in SEQ ID NO: 1, a cytosine at position 88389 in SEQ ID NO: 1, a guanine at position 92523 in SEQ ID NO: 1, a thymine at position 17207 in SEQ ID NO: 2, a guanine at position 19057 in SEQ ID NO: 2, a guanine at position 32252 in SEQ ID NO: 2, a thymine at position 33887 in SEQ ID NO: 2, a cytosine at position 36394 in SEQ ID NO: 2, an adenine at position 39184 in SEQ ID NO: 2, a thymine at position 40707 in SEQ ID NO: 2, an adenine at position 42857 in SEQ ID NO: 2, a cytosine at position 45812 in SEQ ID NO: 2, a thymine at position 46643 in SEQ ID NO: 2, a cytosine at position 47007 in SEQ ID NO: 2, a guanine at position 50015 in SEQ ID NO: 2, a guanine at position 50442 in SEQ ID NO: 2, an adenine at position 51203 in SEQ ID NO: 2, a guanine at position 51983 in SEQ ID NO: 2, an adenine at position 57523 in SEQ ID NO: 2, an adenine at position 60557 in SEQ ID NO: 2, a thymine at position 60645 in SEQ ID NO: 2, an adenine at position 64531 in SEQ ID NO: 2, a thymine at position 83870 in SEQ ID NO: 2, a cytosine at position 4029 in SEQ ID NO: 3, an adenine at position 5343 in SEQ ID NO: 3, an adenine at position 8817 in SEQ ID NO: 3, a thymine at position 18596 in SEQ ID NO: 3, an adenine at position 18602 in SEQ ID NO: 3, a cytosine at position 21583 in SEQ ID NO: 3, a thymine at position 36594 in SEQ ID NO: 3, a thymine at position 37994 in SEQ ID NO: 3, an adenine at position 38293 in SEQ ID NO: 3, a cytosine at position 46972 in SEQ ID NO: 3, an adenine at position 48524 in SEQ ID NO: 3, a thymine at position 72488 in SEQ ID NO: 3 and a cytosine at position 38753 in SEQ ID NO: 4.

23. An oligonucleotide comprising a nucleotide sequence complementary to a portion of the nucleotide sequence of (a), (b), (c), or (d) in claim 22, wherein the 3′ end of the oligonucleotide is adjacent to a polymorphic variation associated with melanoma.

24. A microarray comprising an isolated nucleic acid of claim 22 linked to a solid support.

25. An isolated polypeptide encoded by the isolated nucleic acid sequence of claim 22.

26. A method for identifying a candidate molecule that modulates cell proliferation, which comprises:
(a) introducing a test molecule to a system which comprises a nucleic acid comprising a nucleotide sequence selected from the group consisting of:
(i) the nucleotide sequence of SEQ ID NO: 1, 2, 3 or 4;
(ii) a nucleotide sequence which encodes a polypeptide consisting of the amino acid sequence encoded by the nucleotide sequence of SEQ ID NO: 1, 2, 3 or 4;
(iii) a nucleotide sequence which encodes a polypeptide that is 90% or more identical to the amino acid sequence encoded by the nucleotide sequence of SEQ ID NO: 1, 2, 3 or 4; and
(iv) a fragment of a nucleotide sequence of (i), (ii), or (iii); or introducing a test molecule to a system which comprises a protein encoded by a nucleotide sequence of (i), (ii), (iii), or (iv); and
(b) determining the presence or absence of an interaction between the test molecule and the nucleic acid or protein,
whereby the presence of an interaction between the test molecule and the nucleic acid or protein identifies the test molecule as a candidate molecule that modulates cell proliferation.

27. The method of claim 26, wherein the system is an animal.

28. The method of claim 26, wherein the system is a cell.

29. The method of claim 26, wherein the nucleotide sequence comprises one or more polymorphic variations associated with melanoma.

30. The method of claim 29, wherein the nucleotide sequence comprises a polymorphic variation associated with melanoma at one or more positions in SEQ ID NO: 1 selected from the group consisting of 139, 3525, 7960, 9640, 14845, 19300, 21338, 21343, 42477, 43164, 43734, 44029, 44986, 53410, 83831, 85666, 88389 and 92523.

31. The method of claim 29, wherein the nucleotide sequence comprises a polymorphic variation associated with melanoma at one or more positions in SEQ ID NO: 2 selected from the group consisting of 17207, 19057, 32252, 33887, 36394, 39184, 40707, 42857, 45812, 46643, 47007, 50015, 50442, 51203, 51983, 57523, 60557, 60645, 64531 and 83870.

32. The method of claim 29, wherein the nucleotide sequence comprises a polymorphic variation associated with melanoma at one or more positions in SEQ ID NO: 3 selected from the group consisting of 4029, 5343, 8817, 18596, 18602, 21583, 36594, 37994, 38293, 46972, 48524 and 72488.

33. The method of claim 29, wherein the nucleotide sequence comprises a polymorphic variation associated with melanoma at position 38753 in SEQ ID NO: 4.

34. A method for treating melanoma in a subject, which comprises administering a candidate molecule identified by the method of claim 26 to a subject in need thereof, whereby the candidate molecule treats melanoma in the subject.

35. A method for identifying a candidate therapeutic for treating melanoma, which comprises:
(a) introducing a test molecule to a system which comprises a nucleic acid comprising a nucleotide sequence selected from the group consisting of:
(i) the nucleotide sequence of SEQ ID NO: 1, 2, 3 or 4;
(ii) a nucleotide sequence which encodes a polypeptide consisting of the amino acid sequence encoded by the nucleotide sequence of SEQ ID NO: 1, 2, 3 or 4;
(iii) a nucleotide sequence which encodes a polypeptide that is 90% or more identical to the amino acid sequence encoded by the nucleotide sequence of SEQ ID NO: 1, 2, 3 or 4; and
(iv) a fragment of a nucleotide sequence of (i), (ii), or (iii); or introducing a test molecule to a system which comprises a protein encoded by a nucleotide sequence of (i), (ii), (iii), or (iv); and
(b) determining the presence or absence of an interaction between the test molecule and the nucleic acid or protein,
whereby the presence of an interaction between the test molecule and the nucleic acid or protein identifies the test molecule as a candidate therapeutic for treating melanoma.

36. A method for treating melanoma in a subject, which comprises contacting one or more cells of a subject in need thereof with a nucleic acid, wherein the nucleic acid comprises a nucleotide sequence selected from the group consisting of:
(a) the nucleotide sequence of SEQ ID NO: 1, 2, 3 or 4;
(b) a nucleotide sequence which encodes a polypeptide consisting of the amino acid sequence encoded by the nucleotide sequence of SEQ ID NO: 1, 2, 3 or 4;
(c) a nucleotide sequence which encodes a polypeptide that is 90% or more identical to the amino acid sequence encoded by the nucleotide sequence of SEQ ID NO: 1, 2, 3 or 4; and
(d) a fragment of a nucleotide sequence of (a), (b), or (c); and
(e) a nucleotide sequence complementary to the nucleotide sequences of (a), (b), (c), or (d);
whereby contacting the one or more cells of the subject with the nucleic acid treats melanoma in the subject.

37. The method of claim 36, wherein the nucleic acid is duplex RNA.

38. The method of claim 37, wherein the duplex RNA comprises a strand comprising the nucleotide sequence GATCCGTCTGAAGTGTATT (SEQ ID NO: 769), GAAGCTGAACCGCATTGGA (SEQ ID NO: 770), CCTACGGCATTGTGTATCG (SEQ ID NO: 771) or ACTTGCTCATGACCGACAA (SEQ ID NO: 772).

39. A method for treating melanoma in a subject, which comprises contacting one or more cells of a subject in need thereof with a protein, wherein the protein is encoded by a nucleotide sequence which comprises a polynucleotide sequence selected from the group consisting of:
(a) the nucleotide sequence of SEQ ID NO: 1, 2, 3 or 4;
(b) a nucleotide sequence which encodes a polypeptide consisting of the amino acid sequence encoded by the nucleotide sequence of SEQ ID NO: 1, 2, 3 or 4;
(c) a nucleotide sequence which encodes a polypeptide that is 90% or more identical to the amino acid sequence encoded by the nucleotide sequence of SEQ ID NO: 1, 2, 3 or 4; and
(d) a fragment of a nucleotide sequence of (a), (b), or (c);
whereby contacting the one or more cells of the subject with the protein treats melanoma in the subject.

40. A method for treating melanoma in a subject, which comprises:
detecting the presence or absence of one or more polymorphic variations associated with melanoma in a nucleic acid sample from a subject, wherein the polymorphic variation is detected in a nucleotide sequence selected from the group consisting of:
(a) the nucleotide sequence of SEQ ID NO: 1, 2, 3 or 4;
(b) a nucleotide sequence which encodes a polypeptide consisting of the amino acid sequence encoded by the nucleotide sequence of SEQ ID NO: 1, 2, 3 or 4;
(c) a nucleotide sequence which encodes a polypeptide that is 90% or more identical to the amino acid sequence encoded by the nucleotide sequence of SEQ ID NO: 1, 2, 3 or 4; and
(d) a fragment of a nucleotide sequence of (a), (b), or (c) comprising the polymorphic variation; and
administering a melanoma treatment to a subject in need thereof based upon the presence or absence of the one or more polymorphic variations in the nucleic acid sample.

41. The method of claim 40, wherein the one or more polymorphic variations are detected at one or more positions in SEQ ID NO: 1 selected from the group consisting of 139, 3525, 7960, 9640, 14845, 19300, 21338, 21343, 42477, 43164, 43734, 44029, 44986, 53410, 83831, 85666, 88389 and 92523.

42. The method of claim 40, wherein the one or more polymorphic variations are detected at one or more positions in SEQ ID NO: 2 selected from the group consisting of 17207, 19057, 32252, 33887, 36394, 39184, 40707, 42857, 45812, 46643, 47007, 50015, 50442, 51203, 51983, 57523, 60557, 60645, 64531 and 83870.

43. The method of claim 40, wherein the one or more polymorphic variations are detected at one or more positions in SEQ ID NO: 3 selected from the group consisting of 4029, 5343, 8817, 18596, 18602, 21583, 36594, 37994, 38293, 46972, 48524 and 72488.

44. The method of claim 40, wherein a polymorphic variation is detected at position 38753 in SEQ ID NO: 4.

45. The method of claim 40, which further comprises extracting and analyzing a tissue biopsy sample from the subject.

46. The method of claim 40, wherein the treatment is one or more selected from the group consisting of administering cisplatin, administering carmustine, administering vinblastine, administering vincristine, administering bleomycin, administering a combination of the foregoing, and surgery.

47. A method for preventing melanoma in a subject, which comprises:
detecting the presence or absence of one or more polymorphic variations associated with melanoma in a nucleic acid sample from a subject, wherein the polymorphic variation is detected in a nucleotide sequence selected from the group consisting of:
(a) the nucleotide sequence of SEQ ID NO: 1, 2, 3 or 4;
(b) a nucleotide sequence which encodes a polypeptide consisting of the amino acid sequence encoded by the nucleotide sequence of SEQ ID NO: 1, 2, 3 or 4;
(c) a nucleotide sequence which encodes a polypeptide that is 90% or more identical to the amino acid sequence encoded by the nucleotide sequence of SEQ ID NO: 1, 2, 3 or 4; and
(d) a fragment of a nucleotide sequence of (a), (b), or (c) comprising the polymorphic variation; and
administering a melanoma preventative to a subject in need thereof based upon the presence or absence of the one or more polymorphic variations in the nucleic acid sample.

48. The method of claim 47, wherein the one or more polymorphic variations are detected at one or more positions in SEQ ID NO: 1 selected from the group consisting of 139, 3525, 7960, 9640, 14845, 19300, 21338, 21343, 42477, 43164, 43734, 44029, 44986, 53410, 83831, 85666, 88389 and 92523.

49. The method of claim 47, wherein the one or more polymorphic variations are detected at one or more positions in SEQ ID NO: 2 selected from the group consisting of 17207, 19057, 32252, 33887, 36394, 39184, 40707, 42857, 45812, 46643, 47007, 50015, 50442, 51203, 51983, 57523, 60557, 60645, 64531 and 83870.

50. The method of claim 47, wherein the one or more polymorphic variations are detected at one or more positions in SEQ ID NO: 3 selected from the group consisting of 4029, 5343, 8817, 18596, 18602, 21583, 36594, 37994, 38293, 46972, 48524 and 72488.

51. The method of claim 47, wherein a polymorphic variation is detected at position 38753 in SEQ ID NO: 4.

52. The method of claim 47, wherein the preventative reduces ultraviolet (UV) light exposure to the subject.

53. A method of targeting information for preventing or treating melanoma to a subject in need thereof, which comprises:
detecting the presence or absence of one or more polymorphic variations associated with melanoma in a nucleic acid sample from a subject, wherein the polymorphic variation is detected in a nucleotide sequence selected from the group consisting of:
(a) the nucleotide sequence of SEQ ID NO: 1, 2, 3 or 4;
(b) a nucleotide sequence which encodes a polypeptide consisting of the amino acid sequence encoded by the nucleotide sequence of SEQ ID NO: 1, 2, 3 or 4;
(c) a nucleotide sequence which encodes a polypeptide that is 90% or more identical to the amino acid sequence encoded by the nucleotide sequence of SEQ ID NO: 1, 2, 3 or 4; and
(d) a fragment of a nucleotide sequence of (a), (b), or (c) comprising the polymorphic variation comprising the polymorphic variation; and
directing information for preventing or treating melanoma to a subject in need thereof based upon the presence or absence of the one or more polymorphic variations in the nucleic acid sample.

54. The method of claim 53, wherein the one or more polymorphic variations are detected at one or more positions in SEQ ID NO: 1 selected from the group consisting of 139, 3525, 7960, 9640, 14845, 19300, 21338, 21343, 42477, 43164, 43734, 44029, 44986, 53410, 83831, 85666, 88389 and 92523.

55. The method of claim 53, wherein the one or more polymorphic variations are detected at one or more positions in SEQ ID NO: 2 selected from the group consisting of 17207, 19057, 32252, 33887, 36394, 39184, 40707, 42857, 45812, 46643, 47007, 50015, 50442, 51203, 51983, 57523, 60557, 60645, 64531 and 83870.

56. The method of claim 53, wherein the one or more polymorphic variations are detected at one or more positions in SEQ ID NO: 3 selected from the group consisting of 4029, 5343, 8817, 18596, 18602, 21583, 36594, 37994, 38293, 46972, 48524 and 72488.

57. The method of claim 53, wherein a polymorphic variation is detected at position 38753 in SEQ ID NO: 4.

58. The method of claim 53, wherein the information comprises a description of methods for reducing ultraviolet (UV) light exposure to the subject.

59. The method of claim 53, wherein the information comprises a description of chemotherapeutic treatments and surgical treatments of melanoma.

60. A composition comprising a melanoma cell and an antibody that specifically binds to a protein, polypeptide or peptide encoded by a nucleotide sequence 90% or more identical to the nucleotide sequence of SEQ ID NO: 1, 2, 3 or 4.

61. A composition comprising a melanoma cell and a RNA, DNA, PNA or ribozyme molecule comprising a nucleotide sequence identical to or 90% or more identical to a portion of a nucleotide sequence of SEQ ID NO: 1, 2, 3 or 4.

62. The composition of claim 61, wherein the RNA molecule is a short inhibitory RNA molecule.

The application's sequence listing, which the Patent Office published only in electronic form, follows.

SEQUENCE LISTING (774 sequences)

SEQ ID NO: 1 - DNA, 99100 bp, Homo sapiens
  modified_base (47431): a, c, g, t, unknown, or other
ggggcagcagcagggcggctcgcttgggggcggctgcagctggggcctctgagtcgagatcagggctccctggtcggagcctcagcccaagctctcctccagcctctaacccacaaccctctctcccttcccacagcaycagagcgtggggttggtgacacagcgtttcggggaccgaccctacctccgtgacagctggtcctcctggctgcgcacagagctctcgcccacggcagaggcgccctcgggcagctggctgagctggtccagcacctccaggccattctcctcggcgatctgcatgatgaggctgtccacctgctcctgcggcgtggtcagggtggtggccgagctcatggagtcctccatcacctgggggcaggggcatgctctggacaacaggtggggccaggcccatggggcyccactcagcttcacaagggtacgactgcacttttcgttccctcacacagccagccaccttcttgccctgttctctcagtgactctctctgtctcaccttccaccaggagcctttcctgcccccccacccagccccaccctctgactgtgccatgcctgctgccgcgggtggacatctttccacacctctgcatgcttgtctgccatccgagcctccccacaaggagccaggtgcctgcaggaggcccccgccgccctgcccaccctacctgtcagggtcctggcagggacccagcacagaggatgcttggtgacgtcagggagcaaccacaggtatgcagagacagcacgtcagcctgtgagccacccctcccgatgagctgcccacacacgctccttgtccccaggccacagccccaagggtaggggccacataccgatgtatggacgtccaggttctgcacctgctgctcgaacctgtccatcactgaggagaccttctgcaggtccatggtgctcagggccttgtccagggctttggtcacctgggccatattcttggtcacctgagacaggagagagcgcaggagggaacaggatgaaaggcaagtggagctcacgcaccagggacgggtcccctggactctgacaggagagctggggcaccccaaccctgacccacaaaaccccaactctgggctgagccatcatctgggtcctatggaaagaccaccaactcgacggaaaaggccatggagacccagtgcggggtcagtggagaaaaggccgccgacgtggagacccagtgcggggtcagtggagaaaaggccgccgacgtggagacccagtgcggggtcggtggagaaaaggccgccgacgtggggacccagcgcggggtcggtggagaaaaggccgccgacgtggggacccagcgcggggtcggtggagaaaaggccgccgacgtggggacccagcgcggggtcggtggagaaaaggccgccgacgtggagacccagcgcggggtcggtggagaaaaggccgccgacgtggggacccagcgcggggtcggtggagaaaaggccgccgacgtggagacccagcgcggggtccgtggagaaaaggccgccgacgtggacacccagcgcggggtcggtggagaaaaggccgccgacgtggggacccagcgcggggtcggtggagaaaaggccgccgacgtggggacccagcgcggggtcggtggagaaaaggccgccgacgtggggacccagcgcggggtcggtggagaaaaggccgccgacgtggggacccagcgcggggtcggtggagaaaaggccgccgacgtggggacccagcgcggggtcggtggagaaaaggccgccgacgtggagacccagcgcggggtcggtggagaaaaggccgccgacgtggagacccagcgcggggtcggtggagaaaaggccgccgacgtggagacccagcgcggggtcggtggagaaaaggccgccgacgtggagacccagcgcggggtcggtggagaaaaggccgccgacgtggagacccagcgcggggtcggtggagaaaaggccgccgacgtggagacccagcgcggggtcggtggagaaaaggccgccgacgtggggacccagcgcggggtcggtggagaaaaggccgccgacgtggggtctccaggactgctgtgccctcctggcccacctgcactgtgtgaaggaaatgcctgcaacagccaaggctctgctgtgacgtccctgacccagcagatgagcctggccatgcaggctctgcctcttgtgggagttgccaagaccgaggcctggccaggtacagtgacagtgagtggttcacgcctataattccagcactttgggaggccgaggtgggaagattgcttgaggccaggagtttgagaccagagcggccaacatagacaccctgtctctacataaaaatgaaaaaaatcagctgggcatggtggtggatgcctgtggtctcagctacttgggaggctgaggcaggaggatcgcttgagcccaggaggttgagaccagagtggccaacatagacaccctgtctctacttaaaaatgaaaagatcagccgggcatggtggtggatgcctgtggtctcagctacttgcgaggctgaggcaggaggattgcttgagcccaggaggttgaggctgcagtgagctgtgactgcaccactgcactccagcctgggtgacagagcaagacagtctctaaaaaatatatatttaaaaaaaaaaaagcccaagtcttatcaagaggtccttcctggggcatcagtgcaagctcagggtgcagcctcacctgtgtccctgccagcatttcccaccccacgctgatccagcttaactcaacctccccaccccacgctgatccagccctcaacctccccaccccacgctgatccagcttccctcaacctccccaccccrcgctgatccaccttccgtcaactctgagctgccccagatccagaccgcagagcccattcctgcttcagccagcgaacgccacccatccagcaccagggcccagcactcacccccttcatagtcacagctgtctgcaccttggaggccactgcgtctacgcgggacgccatccgaagccagttcacaccttcgttcttcttgcggatggcgttctcggcatacacacgggcacactctacatttttctgcagaagggcctgaaacccgsgggggaaagcagctggaagagcttggtggtgtgtgtgccccctgctaggagcccagtttttgttttgttttgttttgttttgtttgagacggagtcttgctctgttgcccaggctggagtgcagtggcacgatctcgactcaacgcaagctccgccccccaggttcatgccattctcctgcctcagcctcccgagtagttgggactacaggcgcccgccaccatgcctggctaatttttttgtatttttagtagagatggggtttcaccgtgttagccaggatggcctcgatctcctgacctcgtgatctgcccgcctcggcctcccaaagagcygggatcacaggcgtgagccaccgmgcccggccctaggagcccagtgttgaggcggtgggcgggcctctccccagaaatgtttgagctaaaaatgcaaacacccaggccccagcccagccccccaagcaggcttctgcttccccccgcacccctccagcactccactgggcacgggacacagcgggtgacactcagagcctgtggcaggcagttctccgagctccattctccctgggagcctggctgtgggtgaagagttaccaaagtccaatacgctgggacctacttcaccgattacgcagttttaagagctgcacaagatcctaccttcttttcttttttttctttttttggagatggaatctcgctctgtggcccaggatggagtgcagcagtgtgatctcggctcactgcaacctccacctcctgggctcaagcaattctcccgcctcagccttccgagtagctgggattataggtgtgaatcactgcgcccggcctagatccctcctctccttctgccctgtccatcatggggaggggacccctcctggagaggcacccctgtaagcctccagccccatcccaccccatggggcaggggcatcatgactctgcccagaccctgatgccctagacaccagctctgtagggaggagagagstaaaaatgataggatccgctgggcccagtggctcatgcctgtaatcccagcactctgggaggctgaggcaggtggatcacctgaggtcaggagtttgacaccagcctggccaacacggcgaaaccccatctctactaaaaatacaaaaattagccaggtgtggtggcgcatgcttgtaatcccagctacccaggaggttgaggcaggagaatcactcgaacccaggaggcagaggttgcagtgagccgagaccgcacctctgcactccagcctgggcaacagcgagactccatctcaaaaaaaaaaaagataggatcgtggcagacagctagctagcagccctcctcctgcagatggcaaaatcaagttcagaatgttggaaatgcaaagaaggaaaacaatgaaggcaatgcactcatctctgtgctctggacgccctcagtgggctgggaaggtctggcaggggctgtagggcagggacrgaaaccattctgggctgcaccacacacagcacctcccttcctgagtgcctgtttgtcttatgtgggaagcaaatactttgaggctcagaaatcatagtgaggattaggctgggcacagtggctcatgcctgcaataccagcacttttggaggccaaggcaggtgggtcacttgaggataagagttcgagaccggcctggccaacatggcgaaaccccatctctacaaaaaaattaaaaaattagctgggtgcaagcctgtaatcgcagctacgtgtgaggcgaaggccctagaatcacttgaacccgggaggcggaggttgcagtgagacgagatcgcacctgtgcactccagcctgggcgacagagcaagactccgtctcaaaaaacaaacaaacaaacaaacaaacaaacaaaatatatatatatatgtacctcaaggtgacgattaaatcatgatgtagaaagtgccctgcccctccccaaaaggcatcaaaacaaaacaggacacaaaaataagggcagaaaaggacagaagacaaaccaggagagtcatgaccccacagcccccagggtctcaccttcttcactttggcctgctccgccttggagtccttctccgccttcttggccagcttctccagctgcttcgccgtgaactgagcggaagccggaatgtcctgggtcagacatgcggagcccatcccccaggcccggctctccacacccccacacctgtgcccacacctgtgcccacacaggttcctaagcccccatcagccagcctgggcccagcacaccgcagggaaggcgtgaagcctgtgggcgtgcatcctgggcggcgagagatggcaccagctggaggaggaagctgcctgctctgcctcaggctctgtctgggttttctccagtgtctgtcttctctgtgaacagcctcacccaaggcctcctccagagcggaagggtcaaaaacctctcactctgatctcggctcctgcttatggatggcttttcaacgtcaaagaaagactgaaggaaactcatttcaggctacccccaagtcataacacagaactccaggtaaaaacacacctgaaagtgttatctcgagagaatgctgtggatgcaggaggttgctgggcagcacaagcagcttccggggatctaactgctctgccagcaccacacggaaacagggcctctggcaacaccacaaggacacaggacctctggcaacccacccggaaccacagacgccctggtaccaggtagccctggccaccagcacctcaaggaaacagggcctctggcaacccatctggaatcacagacaccctggtatcaggtagccctggccaccagcacctcaaggaaacagggcctctggcaacccatctggaaccacagacgccctggtaccaggtagccctggccaccagcacctcgaggaaacagggcctctggcaacccatctggaaccacagacgccctggtaccaggtggccctggccaccagcacctcgaggaaacagggcctctggcaacccatctggaaccacagacgccctggtaccaggtggccctggccaccagcacctcgaggaaacagggcctctggcaacccatctggaaccacagacgccctggtaccaggtagccctggccaccacagcaccacagggtgcaggacacaagcaggcctcagccggtcccctctgtgcccaacagcaactgacaggcccaccgtgatgggaaaacatcccaaagctgcatacggtagctccggcacatcactcctgcccagtagctcagagccagcgacaaggcaagataaagctggccacagatgagcagccaggagcacatcccagggaaatgcacggaaacctgccctggattaccggaagctgcaacctccaccccacgtgggaggaatactcagaaagctctccttcaaatgatctcaaagaatgagtccacacagcggaacaccaaggcctaatgcccaagttgtcttttttttttttcttttctttttttttttttttttttgagacggagtctctgtcacccaggctggagtgcagtggcacaatcttggcttactgcaagctctgcctcccaggttcacgccattctccggcctcagcctcctgagtagctgggactacaggtgcctgccaccgcgcccggctaatttttttgtgtgtttttagtagagatggggtttcactgtggtctccatctcctgaccttgtgatccaccccacctcggtctcccaaagtgctgggattacaggcgtgagccaccgcgcctggccccaagttgtctttcttaagataacactccgggccaggcacagtggctcacgcctgtaatcccagcactttaggaggccgaggtaggcggatcacgaggtgaagagatcgagaccatcctggccaacgtggtgaaaccccgtctctattaaaaatgtaaaaaaaaattagctgggcatggtggtgggcgcctgtagtcccagctactcaggaggctaaggcaggagaatcgcttgaacccgggaggcagaggttgcagtgagccgagatcacgccaatgcactccagcctgggcgacggagtgagacgccgtctcaaaaaaaaaaaaaaaaaaaaaaaagataacactatttctttcatggctttcatggatgaccctaaggatctgcctccacttagcctcagataagaaaagagctaatatgtcaccaaggtggctcaataatcccctccttggtcagcagtctgagccctgtgtggcggtcactcaactgttatataatctgcccgactgtttctgtggctctgagtgagcgtggcttatactatctgtcctcaccagaacagggctggggtgaacggccattcggtacataccttcaactggaacagggtatctgcaaagaaagagggaattaatggtttgaggattgggaatgggacgttacacttctggcaggcaggactcactaggttccttctagacaccaggagctagaacacacacacagaccacacctgcctggggccttcggggagccccccccaacaggggaggcacgagacagattcgtgtgccagccctggctccttgctagccacagggcccagcaaatgcagaccctccctccctgtttccttgttgggaacatgagggtggtaccagccaatctcaaagggttagtgtgaggacagaagaggtcatggacgcagcatcttttggccatggttagaatccaaaagatggtggtttataattaatgcaactttgcaaawgtcccttgggattctttcccaatttaaaagttcacctgtaatcccagcactctgggggtgccgaggccagtggatcacttaaagccagggtttgaggccagcctgggccaatttaaaagtkcagtacttgacagtttactttttacagactctttctcctcaaaggtaaatggataaaaatagcaaggtggtaactcttagacatcaaagagctgatttccagcggtacagtcrctcacgcctgtaatcacagcactctgggaggctgaggcgggcagatcacttgaggtcaggagttccagaccagcctagggaatatagtcagacctcatctctattagaaaaatatatatttttttgccgggtgcggtggctcacgcctgtaatcccagcactttgggaggccgaggccggcggaacatgaggtcaggagatcgagaccatcctggctaacacggtaaaagcccgtctctaccaaaaaatacaaaaaattagccaggcgtggtggcgggcgcctgtagtcccagctactcaggaggctgaggcaggagaatggcgtgaacccgggaggcagagcttgcagtgagccgagattgcgccactgcactccagcctgggcaacagtgcaagactccgtctcaaaaaaaaaaagaaaaaatattttttttaaaaagtaggattgatctcaattcattcaactgctaaatttggagagcgaccctgaccccagattcctgaaagggctttaccacactagccacaacgaggaaatggagcctgtaaaagaatgaggttactgagtgttcacaaatgcacaccaaggctccaagatgagatctcccggggttccagaaagctctgggcatcgttcaatctatcgcctgtcagtgcaggcgtggtcaaggccaagttcaacctgtcatctatcagttcaggtgtggtcacggccaaggttatctgtgactggaaaacagccagcctgacccagatggcacagtgcaggccaggcgggccgtcccacccaactcactgtgggatgctggccaaaccgccctcctcatctcagctttccctcacctcagctttccctcacctcagctttccctcacctcagctttccctcacctcagctctcctcacctcagctttcctcacctcagctttccctcacctcagctttcctcacctcagctttctcttccagccgtgtgtggcagcacaaaaacccagctaaggcaaaatctgactctgaggaaatctgacatgggcttgagagaagtcccctcaaaagagttgagtgagctgtggagtgaaaagccacaatttttcttttttttttttgagacggagtctcactctatcacccaggctagagtgcaacggcaccatcttggctcactgcaacctctgcctcccaggtttaagcgattctcctgtctcagcctcccaagtagttagaattacacgtgcacgccaccaggcccagctaatttttgtatttttagaagagacggggtttcaccatgttggccaggctggtctcaaactcctgacctcaggtgatcaaccaacctcggcctcccaaagtgttggggttacaggcgtgagccaccacatccggcctcccaaagtgctggaattacagccgtgagccaccgcgcccggcctcccagagtgctrgggttacaggcctgagccaccacacccggcctggccagcatattttttgtggcgggaggtagatgttatctttcatcttctctcagggcagaaaatctctacacatttccttcatgatgatgacacggtggtactatagcttttcacacttctaactaaaagaattttttttgagacggagtctcgctctgtcgcccaggctggagtgaagtggcgcgatctcggctcactgcaagctccgcctcccgggttcacgccattctcctgcctcagcctcccgagtagctgggactacaggcacccgccaccacgcctggctaatatttttgtatttctagtagagatggggtttcactgtgttagccaggatggtctcgatctcctgaccttgcgatccgccggcctcggcctcccaaagtgctgggattacaggcgtgagccaccgcgcccagcccttcaaaaagtatttttaaaagcctgcccatcacaccagcccaacgatgtttcagcaaacataggacttcattttgccagattcttcctgttctttggtatccctgagcacacagccggctagccccagatgtagaaggtaagaattagggcgacccattgagcacagaaacgcttgtgctggctcctgctcaaacctctgcttccccacatggagaatggacgcaaagagctgctgtgaccagggcctggcactcagggagcgctttctgtctgagtccttctgatttgcagtgatgctgtttggggcagggggtgcaactgtcactttttctggtgccctctgacccgacattccaagtcccgaaaggccgaacaggcatcgcacagtcccccctaccgagctggcgggaaagggcgcctgacgctgaggagtgccaggggcgggggaaagggtcctgggtcggtggtcgggggtccaggccctgggcaaggggtcctgggtcgggagtctaggtcccgggtccatggttgggggtcagaggtcgaggccccggggaaggcataccgggttgagatttggggatggaggccccggggaaggggtcccgaatcgggggtcggggatcgaggcctggggggaggggtcccgggtcgagggtcgaggcccggggtaaaggatctcgggttgggggtcgggggcctgggaagggtcccggtcggtggtcgggggtcgaggcccgggagaaggggtcccgggtcggtggtagaggccctggggaaggggttccgggtcggggatcgagggtcgaggcccgggaaaaggggtcccgggttggtggtctaggccctggggaaggggttccgggtcgggtatcgggggacgaggctcgggaaaaggggtcccaggtcggtggtcgaggccctggggatggggtccgggtcggggatcgggggacgacgaccgggaaaaggggtcccaggtcggtggtcgaggccctggggatggggtcccgggggatcgacggtcgaggcccgagctctcctgagtcctgcccgcggccccaggtgggcggagcccacgccagtgggagaagcggccccgccccgcgcgcgagtccccggaggacggccgcgacctcttaccgtccatggccacaatgacaggagcagcactcggagagggagaagggacgccaactccgggcggtgtcaggtcccggcggcgatcgaaccgaccaagctgcacccggcggggacttccggggtcgccgccccacttccggtcgcacgggatgctctcgcgagaggatggtggccggtcccgccagaggggcggggcgcggctgcgcggcgcgcggtcgccatggtgacgcacgccgctggcgcgaggaccttttgtgagtcgctcccggctccgcggccgcggaggtgtggggacccgggcttgcgtcggagggggcggtgggctcacccatgggcctttccaaaagcaaagagaaacccaggaaaggtaaaggaggcgcaggcgctgggctccccgcgtctccgcccctgggcgcgggcccagggcggggctgggctgggcggggcggtgtgagcgcaggcgccaggctcggcccggtgcgaaccgttcctgccgccgagtccgccacggacggcgcgtttcccgcctgaggcggttacggaaacgcggagactcgagacttgaagccagcttattctggatccacgcaggcgactgaagacgatgggacccactgccctgcattcggtaagtcccgggtctaacggatgatccatatatttcaggtgaggagcaaaagaagggatccacctattcagttccaaaatctaaggagaagttgatggagaagcattcccaggaagccaggcaggcagacagggagtcggagaagcctgtggacagcctccacccgggggccgggacagccaagcacccgccgccggcagcttcgctggaaggtaggagacggcgggagggagcgaagcgaggtcagtggcttggaggatctggggctggggtgaggagcctactgtaagaccctaccggatggacactagtagcaggcacgcgccgtaaagatgaaactggtttgttttgggaactttatgtaggaggtaaatatccagaaatcttagttgaaaacataagtttaatgaaaatgtaggtcagttcccgagtgataagtgcgtaccaggtggtcgaggggctggggcagtgtgcgtgtgtctcacctgaggttctcctcgagggctgggtatcttggtgccactgagaatccctgagcctccgcacactggaacagagcattgggaggccgtcccaggctggactgtagctctccgagggctgtggggataagtacattgcggagggtgaccgaggagtagaacctgggtgcgacaaaggtgtcttttataacagcctagtgtggccagacctttgggtgtgtgtggggaagatgaggccccaaaagtaggaagaagctagaatacaaagttttccatcagttttaccacgtggagctggaagcgttaaatattttaaacaacggaggtgctgcctggggcggtagttcacacctgtcctcccagttatttggccgaggcaggaggatcttttgagcccaggagttcaagaccagcttgggcaacatagtgagaccctgtctctacaaaaaataaatatttaaaaataaaaaacaagggcggcatgatgaggtctgtgcctaccaacaggggaagccagttcgcaggggaggtggcccggtcagagacccattgctgtggcccagtgggagccagcaaggccttgcagtaggaattgcagaagggtcaggcagggagaacccgcagagcctgccgtccgaggagattgggggcctgtgccaggaggaggtgttttaagtttcatcacaagaatgaaccactcggctgggcgcagtggctcacgcctgtaatcccagcactttgggaggccgaggcgtgtggatcacttaaggtcaggagttcaagaccagcctggccaacgtggtgaaaccctgtctctactaaaaatacaaaaattagctgggcgtggtggcatgtgcctgtaatcccagctactcaggaggctgaggcaggagaattgctcgaaccttgaaccgggacccgggaggcagaagtagyggtgagcgagatcgcaccactgcactccagcctgggctacagagtgagactctgtctcagaaaaaaaaaaaaataataaggagagaaccactcgggtcagacaagaaagaatgtcagggggatgactggcctgctaggcagaggagctgggcctggactgcttcacactgacacgcttgtaggatcaagggctgaaagtaggaggctctgggccttggacttggaagaaagacttggatttgaattcccaactttggaacctcccactggagggtggaacccctcacaggagggcgcaaccccccaccggaggatggaaccctgcaggaatagcatcacccttgggtggcagtttggaaaatgctacctgtctgtcacggtgcttttagctgaaagttacagaaaagctcactaaacgcagctttaacacagggatttaatgtctcacgaatgaagggtcagaggtggagcttccaggttggcttgttagcacaacagtgacatcaaagactttgcgtgtctcttcttgaccactctcagtgtccacagcccccgatgagtgtacagccccccacacgcaggcaggactgcatctactgcaaaggcattgctccttgcttcatattagcaaggaaacctttcccaggaaggcttcgcctgcccagcctctgcaggactcattcaatggtgcaaattcaccaggggctggagggagctgtgaagcatgggagtgggcaggacctctgccagtaacggaagtgggggaaggaggaccgcctgttggaagggccccagcagtgtctgtcacaccagagggtgggggaggaaggtggacatgaagggaaaacagcagagcaagagtgagaacagagtttcagcagataaaatgaagtgtgcacgctctccatgcagtgacgggctgagcgacagtgaggagcaggctgctgactcccttgccacaccgtgaaggagtcccaaaggtgggacactgagtgagacaagccagaggaaagaccactcatgttgcagttccctttccatggaatgtccagaaaaggcacatttacagagagaagcagatgagtggttgctgggcagaaatgggagccggccacagctgagcacaagaggactttggagggtgatggaaatggttttcgacctgaatctgaacatgggaagcactgcagtttagtagtcctggtccctaagcccttccagcccaggagccagacctgtgagcaaacaagcctttagtgattccaggctctggctggaaccttgagtcttctcagcttggggcatgcacctcagggggagccagcatcagtgtccagccccaagagcttccctgtacgtctcagtgagtcttcacatgcctccaactgcctggacaaccacacgtgatacctgtcctgccaaacgtgtcctgaacccataaaatccagagaaaagaaaatcgttttaaactgctgaggtttggggtaagttactatgaagcagtagtgagaagaacagaagggccatgatggggagaaagtttggccataagttaatcaytgtggcagctgttaggatattgatgtggcttggctgtgtcctcacccaaatctcattttgaattcccacatgtgggaggaactgggtrggaggtgattgaattatgggggcaggtctttcctgtgctgttttcgtgatagtgaatgagtgtcacgagatccgatggttttaaaaacgggagtttcctgcataagctctctctctgcctgctgccatccatgtaagatgtgactcgctcctccctaccttccgccgtgattgtgaggcgtccccagccatgtggaactgtaagtccattaaaccttcttcctgtgtaaattattcagtctctggtatgtctttattagcagcatgaaaacggactaatacagatagatgtattatactgttacccctactacttctgtatatgcttaaatttttgcattacaaaattcacaaacatacaaacattatagagaactaacatcacagatttacagtcaccttattccacaatgttggaaattctaccacaaataaagaacttgaaaaaaaaggaggggatgttagaaggaaatctgagcgacctagacctgggctcagtcacgcctgagacagtcagatggggtatctgaggatgagtcagtgttaattttctcagacctgggctccgtcactcctgagacagtcagattgggtatttgaggatgagtccgtgttaattttcttagatgtgggaatgctattatagttacgctaaaacacaatccctatctaataaatacactgcaacatttatgggtaaaatcatatgtctgaaattccttaaagatactcagaatgccaggcatggtggctcatgctgtcatcccagcactttgggaggccgagacgggtggatcacttgaggtcaggagttcgagaccagcatggccaacatggtgaaaccctgtctctacaaaaaatacaaaaaaattagctgggtgtggtggtgcacacctgtaattccaactactttggaggctgaagcaagagaatagctggaacccaggaagcagaggttgcagtgagccacgatcatcccactgcactccagcctgggcaatggagtgagactccatctcaaaaaaaaaaaagatactcaggaaaaaaacgaagaaagaacaagataacaaaatactgattgaagctgagtgctctataggtgcaggtgctcattcactattctattttcttgtgtgtttgaacacttttttttttttttgaaatggagtttccttcttgttgcccaggctggagtgcaatggcatgatctcgggtctcaactcactgtagcctccgcctcccaagttcaagtgattctcctgcctcagcctcccaagtagctgggattacaggcgcccgccatgacgcccagctaattttttttgtatttttagtagagatgrggtttcgccacgttggctaggctggcctcaaactcctggcttcagctgatccacccgcctcggcctcccaaagtgctgagatcacaggcgtgagccaccgcacctggcctcccagagcgctgggatcacaggcgtgagccaccacgcccagcctgtttgaacacttttgtgacgttttgttgtttgtttgttttgagatggagtcttgctctgttgcccaggctggagtgcagtggcacaatcttggctcattgtgacttccgcctcccgggttcaagcaattcttctgcctcagcctcccgagtagctgrgactacaggtgtgcgccaccatgcctgggtaatttttgtatttttagtagagacggggtttcaccatgttggtcaggctggtctcaaactcctgactttgtgaaccacccgcctcagcctcccaaagtgccagtgttacaggtgtgagccaccacgcccggcctgtaacattttcatgaaggtagagtatacttaattgcaagaaaattttgaaaaagaagagaaatggaacacttckattggctattaaaaaataccatgctgagtgaaaaaagccaatcccagaaggtcacatgctgtatgattccatttcttttttttttttttttaggctggagtgcaaatggcacgatcttggctcactgcaaccttggtctcccgggttcaagcaattctacctcggcctccggagtagctgggactacaggcatgcgccaccatgcccagctaatctttgtatttttagtagcgatggggtttctccatgttggtcaggctggtctcaaactcccgacctcaggtgatccgcttgcctcaaactcccgatctcaggtgatccgcttgcctcggcctcctgaaatgctaggattacaggcgtgagccaccatacccggccgtgattccatttctgtaacattctctgaatgacaaaattatagacagggaggacagattgttgattgctagggccttggcgttggggtagggagtgagggggtctgtgaagggcagggctttggggttggggtagggagtgggtgtgtctgaagggcagcaggaggaagatgggattgttggttttggtggtgattgattaaatggcgtagctgtacatacactcatagtaccggagtccatttcctcgtgtcgataatggtactatagttatataaaacgttcgctttgggagccaagcacagtggctcacgcctgtaatttcagaactttgggaagcctaggcaggcagatcacttgagyccagaagttcaagaccagcctgggcaacatggtgaaacctgatttttacaaaaaagacaagaattagctgggtgtagtggagtgtgcctgtagccccaactaatcaggggcctgagataggaggatcccttgaccccatgaggttggggctgcagtgagccaagatcgtgccactgccctccagccccggcgacagagtaagaccctatttatgcttcctagcaaggaaagacagtacacatattgaagaatttgactgcgttaaaatgttaaacctctccccaaactcttataaacaattgtagaacaaatgataagctcaaaaaaatatttacatctatgagaggccaaagaatatcagttgactctggatcaggggctcggacacgttgctgtggaggcacacatcttcctggaaggcggtttggtaacaaggtggcaggactcaagacagcccacacgatccctgcccctgggaaacagccatgtgtaaccctcccctcgagtgtgggyggaatgaggaagagggaggtgtgtctctcctgcgattagctcactcatccattgagtttgacgtcatcaaaatgcgagatgatcctggatgggcccgacctgatcagggaagccagacagtaaaagtgtcagaggctctttagggcccgacctgatcagggaagccagacagtaaaagtgtcagaggctctttagggcccgacctgatcagggaagccagacagtaaaagtgtcagaggctctttagggcccgacctgatcagggaagccagacagtaaaagtgtcagaggctttttagggcagcgagaaaacgggaacttcattccttgaaccgggaataaattctgcctccaaccrgaatgggcttagaagagggtcctccagctcctcatgagaatgcagtgcagccggcccctggaattcagcctgcgtcccagccacgctgcacctgcacccctgacgacgaatgcagtaagatgataagtggatgtgctggtttcagccctgaagttggtggtgatttgttgtgcagcaatagaagtacacacaatatgtaccaagaaccttgagaagagtcacatttattctttctgttttgtttctgagatggtctcacccaggctggagtgcagtggcaccatcttggctcattgcactcttgacgttctgggctcaaacgattctcccacctcagctccctgagtagctggggccacagtgcacgccaccacccccagctattttttgtagtttttgtagagatgcggttttgtcatgttgcccaggctggtctcgaactccagaggccaagcaatctgcctgcttcagcctcccaaggtgctgggattacaggcgtgagccaccgcacctggcccaagattaatatttctttttttttttgagatggagtcttgctctgtcgccacccaggctggactgcaatggtgcatctctgctcactgcaagctccgcctcccgggttcatgccattctcctgtctcagcctcccgcatagctgggactacaggtgcctgccaccacgcctggctaattttttgtattttttttttttttaagtagagatggggtttcactatgttaaccagaatggtcttaatttcctgacctcgtgatccgcccgcatcggcctcccaaggtgctgggattacaggcgtgagccactgcgtctggcctaatatttctaaatgaagaaactatactytgaggaagatgaaataagtcttgttttagactagaaaatttcaatagtgtaaatacgttaacttctgtaaaatcagtcaacaccaagtcaaaacacaaaagatcttttgggaatatgagcagattattcaaaggttcatctaaagaataaaaatgaggccaagtgtagtgattcacgcctgtaatccyggcactttggaggccgaggcaggtggatcacttgaggtcaggagttcaagaccagcctggccaacatgatgaaagcccatctctactaaaaatacaaaaattagctaggcgtggtgatgggtgcctgtagtgccagctacttggggaggctggggcaggagaatcacttgaacctgggaggtagaggttgtagtgagccaaaattgtgccactgcactccagcctgggcgacaagagtgagaatccatctcaaaataaataaatgaataaaaatgaaagcagtaggaaacatctggaaaaccagaggcatgagggggtcgggccctctgatactcaagtaggttagagtaaaaaaaagccagatatggtgatgtgggaatatatggtcccataggtgggatctgtggttccagctactcagtgaggtccgaggatcacttgggcctgggaggttaggactgtagtttgctatgatcacatccacgaatagccactgcgctccttcctgggctacagagtgagacccttctctaaaaatggaagaaaatggccggcacagtggttcatggctgctgtaatcccagcgctttgggagggtgaagtgggagaataacttgagcctgagagttcgagaccagcctgggcaacatggcaaaaccgtgtctctacaaaaaatttcaaaattaggtgggtgtggtggtgtgtagggtccagccccacagggtcggtgggttttctccccatgtgcggagatgagagagcgtagaaataaagacacaaggcaaagagataaaagacagctgggcccgggggaccactaccaccaagccgtggagaccggtagtggccccaaatgccaggctgcactgatatttattggatacaagacaaaggggcagggttaggagtgtgagccatctccaatgataggtgaggtcatgtgggtcatgtgtccactggacagggggcccttccctgcctggcagccaaggcagagagagaggagacagagagacagcttacgccgttatttcagcatatcagagacttttagtactttcactaatttgctactgctatctaaaaggcagagccaggtgtacaggatggaacatgaaggtggactaggagcgtgaccactgaagcacagcatcacagggagacgattaggcctctggataactgcgggcaagcctgactgatgtcaggccctccacaagaggtggaggagcagagttttctctaaactcccctggggaaagggagactccctttcctggtctgctaagtagtgggtgtttttccttgacactgacgctactgctagaccatggtctgcttggcaacgggcgtcctaccagacgctggcgttaccrctagaccaaggagccctctggtggccctgtctgggcataacaaaaggctcacactcttgtcttctggtcacttctcaccatgtccccccagctcctgtctctgtatgacctggtttttcctaggttatgattgtagagcgaggattattataatattggaataaagagtaattgctacaaattaattaatgatattcatatataatcatgtctgtgatctagatctagtataactattcttattttatatattttattacactggaacagctcgtgccctcggtctcttgcctcggcacctgggtgacttgycgcccacagtggtgcgtgctggtggtcccagctacttggaaggctgaagtgggaggatcatttgagcccaggaagttgaggcttcagtgagccatgatcatgccacagcatttcagcctgggccacagaccttcaagatcctgtctcaaaaagaaaaagggrtatckctcagtgcttagtgcagctgtgggtcattcggcagctgacacagatgaggctatgtaacgcagcactgcaggcagagggggaggccaaggcctgaataccccgtctgactagccttaggcaggcgacttggcctctctgcctcccccatctggttagccttgggcagtcgagttggcctctgtgtctcccctgtttgactagccttgggcagatggcttggcttgtctgtacctcagttttgtctgaaatatgggytgtcagagacctatagcagaagctgctgtgtgtcattattcactgttctagggctcagaacaggcacgcgataaaagccagcaccgttggccgggcgcattggctcacgcctgtaatcccagcactttgggaggccaaggcaggtagatcacctgaggtcgggagttcaagaccagcctggccaacatggagaaaccctgtctctactaataatacaaaaattccccaggtgtggtggcaggagcctgtagtcccagttgctcaggaggctgaggcaggagaatcacttgaactcaggaggtggaggttgcagtgagccgagatcacaccactgcactccagcctgggtgacagagcgagactccgtctcaaaaactaagaagaagattaataataaaccagcactgccattgccagcagtccatcctacctcgcatccaggttcgtgagctaccaagtgtccccacaaagctgtaaaacarcatgaccactgtagttacgtttctgtaaaaaggtgactgagtcttctaaccctgaccacacatatgtgtgcagagagagccagctccatcctgctctcccagaagcctgaacagctgtgccctagctcgtagcagtggcactccaggaagggggcgggcggctgtgcccgagctcgtagcagtggcactccaggaagggggcgggcggctgtgtctgagctcgtagcagtggcactccacgaagggggtgggcggctgtgcccgagcttgtagcagtggcactccaggaaggggcggccggccagccaggagagcagccggtgaaggagcacttttgctttgtacgtggcaacgctcggcaggctcagcagtttcacaggtctcaggcgttccttgtaaccttaacaggtttaagaaaatgtgagcaacatcagacatgtccatttctagaacattctaatggatgaagttctgtacagagggctttagcagaattagagacctttggagtggaaatgatgtctctgaaccttgagctctgaggcggttcctgcctggacgtgtgccctccctccttcctttgctggtcgccctgacaccatcctgccacggatagtggaagtgtttctcctgttttcttccctgaaaaagggtgtccagcatcagcaaccttcatggctgagttgcacatcccttaagccctgtaatgttcatggacagttttgatcacttttggactcacccattttttctgctaaccatacatcttaattcctttactctgaccaatggcaggaggtgtgtgcatcgtggaaggagctttccacacatctactaaatgcctggatgttttttcctctagagaaacctgatgtaaagcaaaagtccagcaggaagaaagtggtcgttccacagatcatcatcacgcgagcgtcgaatgagacgctagtcagttgcagttccagcgggagtgaccagcagagaaccattcgggagccggaggactggggcccctaccggcggcacaggaaccccagtacagcagacgcctataattcacatctcaaagaataaacaagcacctttgcatggcactcgctactccctgcgataggcgtctcgggaacagccgcctcaccctgtgagaagccgaggccccttctccagtgctctcggggaggttgcaccaggcccaccccaccctgtgagaaactgcagcccccttctccagtgctttcggggagggtgcaccaggcccgccccaccttgtgagaagccgtggcccccttctccagtgctctcagggagggtgcaccaggcctgcccccgccgtgagaaactgcagyccccttctccagtgctctcggggagggtgcaccaggcccaccccaccctgtgagaacctgcagcccccttctccaatgctctcggggagggtacaccagggttgccccaccctgtgagaagccaccgcccccttctccagtgctctcggggagggtgcaccagggctgccccacgctgtaagaagccgccgcccccttctccagtgctctccagcccgccccaccctgtgagaagccatggccccttctccagtgcttttggggagggtgcaccagggccaccccaccctgtgagaagccgtggcccccttctccagtgctttcggggagggtacaccaggcccgccccaccctgtgagaagccgtggcccccttctcccgtgctctcagggagggtgcaccaggcctgcccccgccttgagaaactgcagcccccttctccagtgctctgggggagggtgcaccaggcctgcccaccctgtgagaaactgcacccccttctccagtgctctcggggagggtgcaccaggcccgccccaccctgtgagaagccgcagcccgttctccattgccatttggtcctgccttccccagagctgctagcagctcggtcgaggcaagagtgactggctcagagagcgagctttgtggtattgataaatgaataaattagtatgttcatgttggaagtggctggctctgcagagtgatggacagcaggtggcatcttacattgtgatttgtggtgcacagttaaaacacttcccttcgtttcagaaggagacaatgtgaatacttggaaattatagtgaataagatgcctcccaaacttgaggaaaaggtcagattctaagagctaaacgttaagatgtaatgttccagaacaaagaggcccagagtcactgaacggggccccagggctcctagcttgagtgtaatctgagtcagcttatgaaaaggccccaaagaagaaagtggaatgtgtgctgggcacatgggacagccatggcactgagactttggaagtggccttgccagcgctgtcctgtctttctggcccacagatgagggctcctgattgtggaaggccacggaagggacctgaacacgatggcacgagacaagttatctcctgtgactgctcctctccagcaaccctcagctcaggctagactttccccctgtgttgagaatgccctgccctgtgtggaagcctgatgcatttagtgacagtgtgttagctttgttagtttctagtctggccagcaggctttccatgtgatctgccattggcttgcttcagtggccagtggagccaggggtgtccaccagagtcttggacacagacttctgaggtggcagcgggagggagcctgctccctgccacacacgtacaatttctaatccatacaggcctatgtagtatatacacacatacgcagagccttaggaattgtgaaaggccaatcaaaacttggggccctaatttcactctgccaaaagaaaaaaaaaaaaagctgaaagatgagtcacccaagaaactgcttcctttttgttcctaagcagagagctaccaataaaaagttaaagtttctccataggtagctactctgttcaccttctgtgaagtgccaaattttttttttattattatactttaagttttagggtacatgtgcacaacgtgcaggtttgttacatatgcatacatacgccatgttggtgtgctgcacccattaactcgtcatttacattaggtatttctcctaatgctttccctcccccctcccccctaccccacgacaggccccagtgtgtgattttccccttcctgtgtccaagtgttctcattgttcagttcccacctatgagtgagaacatgcggtgtttggtttattttacttgcgatagtttgctgagaatgatggtttccagcttcacccatgtccctgcaaaggacatgaactcatccttttttatggctgcatagtattccatggtgtatatgtgccacatttgcttaatccagtctatcactgatgggcatttgggttggttctaagtctttgctattgtgaatagtgccgcattaaacataggtgtgcatgtgtctttatagcagcatgatttataatcctttgggtatatacccagtaatgggatggctgagtcaaatggtatttctagttctagatccctgaggaatcgccacactgtcttccacagtggttgaactagtttacagtcccaccaacagtgtaaaagtgttcctatttctccccatcctctccagcacctgtttcctgactttttaatgatcgccattctaactggtgtgagatggtatctcattgtggttttgatttgcatttctctgatggccagtgatgatgagcattttttcatgtgtctgtaggctgcataaatgtcttcctttgagaagtgtctgttcatatccttcacccactccatcaaaaagtgggtgaagtgccaatttactgagcacgagacaaatacatcattgacttcttttgtcttgtggattcaaggatgtgtccacgcccgccctccttcccctccagctcctccccttgaaatactgaagccctcaacatcatctttggaggaaggtacagagttggctctcacgcgcacatccttaaccttggcctaataaacctctaaggtggctgagacctgtctcagatacttgttggcttacaaattgaccaccatgcagggactcagagtggaggtggccctgccctttggcaggtttcctcctggtgcttaggaccagtttgggccttctttattgctcaggacagtaggacaatttgctgagatccgggagccctaccaccctccagagaatctctgatctcccgaaacttggttgaggtcgaaagtttattttgcgcacaatgccttttccttttccggtgttttacttgcttccaacaaagaaggcgagttttcctgcttccgtgatgatggggagcaggagacttccctggagtttcagctcggaaacaactcgagtttttcctgattccacgatgggggagagcagtctaaagcctgggccccattcctaggtaagtggctgaattggggttctgtcttggaagttctccttaatgactaaagctaacattaacgactggctggtcttaacttcttactattagcatgctcagtaagtgtataaattgtgggattgtttgttttgcttaactgctttttgtttgtttctgtgtttgctatttttgctgtttcagtctttttcccgttggatttgacgaattctgttagacttggtcaaatctgaagcaaacttccaagttgtgggaaacaagcctctgaattagctgaattcccacagctgggaaaaaggaaaaaaagccagaaaaagggaaaaaagattttgaccacgtgatgggctttatttgcataacgaggccacgtttttccagccaagccacactcgaagagtaagtgccgtcacctcacgctgcagttcggtaggtagagtccgccatttttccaccaggacagcccgggtttggttcctacatcctttctggtttgaaatttgtgttacttttgaaatatcagcagtttgtcccggctgaaataaggtagtgagatttaaagatttaaaaggattttctttttttttgagacggagtctcgctctgtcgcccaggctggagtgcagtggcrcgatcccagctcactgcaacctctgccgcccaggttcagccattctcctgcctcagcctcccaagtagctgggattacaggcacttgccaccgcacctggctaatttttgcatttttagtagagacggggtttcaccaccttgaccaggctggtcatgaactcctgatcttgtgatccaccctccttggcctcccaaactgctgggattacaggcgtgagccactacgcccagccaagaggatttttaaaagggcttaatggtcaaaagtaaacttaactaaaagctaatatcggatatattccaacatagtagcttaattaagtccgtatgccacatacacatatacagacccctgtgtagaaaagaaggcaccagactcstttttggggagaaacttctgtttttcttatggaactccaagagtggaaacagacacgttcctctcagatcttaaattgcttgctattgtattgtgttacctgatttttttttactaaaatagttgacacaggactttttggggtgctgcttctctagctggaggcctctgtggccggtggtgcccctacccgggtctcctgggctccagggttggccctggagtaccccgcccacctagcccggccgtgggatccgccctcagcccatggctggactgcgcatgcgcacgccgcaacccgcttcagccttgagcactggagtcyggacaagaggagtgtggtggcgcacaaaacgcccaaagatgccaggaacggcagagccccaagggtgtcacagctcgattgttccccccgcctgcggtctggtgagtgggggtgtgttacagtgtcaccccccctttttttttttttgagacagagtctcactctgtcactaggccagagtgcagtggcacagtctcggctcactgcaacctccgcctcctgggttcaagcgattctcctacctcagcctcccaagtagctgggagtacaggtgcctgccaccacacctggctaatttttttttttttttttttttttttttttgagacagagtttctctcttgttgcccaggctggagtacaatggcacgatcgcagctcactgcaacctccacctcccaggttcaagcgattctcctgccttagcctcctgagtagctggaattacaggcatgcaccaccatgcccggctaattttttgtatttttagtagagacagggtttctccatgttggtcaggctaatcttgaactcccgaccttaggtgatccacccgcctcagcctcccaaagtgctaggattacaggcatgagccaccacacccagccagtttttgtgttttcagtagagatggggttttaccatgttggccaggatggtcttgatctcttgaccttgtgatccgctcacgtcagcctcccaaagtgctgggattacaggtgtgagccaccaggcctggccgtcaccccctttttgaatctgtgattcagcaagtcccaaatgcttctcccatgtccaagaaaaatgaaggtatgcagacaaccggagggtgagcaggacaacgttttgttgagcaacagaacagttctcagtgaagaggggagccaaagtgggcagcccctactcaaagttgggtacgcccccactgaagtcccccaccatgcacagcctataattttatctttgacttggcattcttttttttttttttgagacagagtcttgctctgttgcccaggccggagtgcagtggtgcgatctcggctcgctgcaacctccgcctccagggatcaagtgttctcctgcctcagcctcctgagtagctgggattacaggtgcccgccactacacctggctaattttttgtttgtttgtttgtttgttttttgagacagagtcttgctctgttgcccaggctggagtgcagcagcgcaatctctgctcactgcaagctccacctcccgggttcacgccattctccggcctcagcctccccagtagatgggactacaggcgcccaccaccacgcccagctaattttttgtatttttattagagatggggtttcaccgtgttagccaggatggtctcaatctcctgaccacatgatccgcccacctcggcctcccaaagtgctgggattacaggcgtgagccactgcgcccagcctaatttttgtatttttaatagagacagggtttcactatgttggtcaggctggtcttgaactcctgacctcatgatctgcctgcctcggcctcccaaagttctgggattacaggtaacattcatttttaatgtccctctaacacacccagactctccctctgtattttgagatgtaaattttgctatctgatttttcacctaagagttcttcctttggtatgtcaatttagggctatcaagctgaaaattgcctaagacaatgaaacaggttatcaagaaattggaagtttaggccgggcgcaatggttcacgcctgtaatcccaacaaattgggaggccaaggcgggcagatcacttgaggtcaggagttcgagaccagcctggccaagatggtgaaaccccatctttactaaaaatacaaaaattagctgggtgtggtggcacgtacctgtaatcccagctacttgggaggctgaggcaggagaatcgcttgaacctgggaggcggaggttgcagtgagctgagattgcgccattgtactccagcctgggcaacaagagcaaaactccatcttaaaaaaaaaaaaatacaaaaattagccgggcgtggtggcaggtgcctgtaatcccagctacccaggaggctgaggcaggagaatctcttgaacccaagaggtggaggttgcagtgagttgagactgtgccactgtactccagcctgggtgacaaagtgagactccaactcaaaaaaaaaaagaaaaagatcgaaagaaagaaattgtaagtttaaaatagtagaaaaaaaagaaggggtcttatgcatcttctgtgtgtcgaatgcatctatgtatctatgagtcatgtatacaatgtttcactaccaaaaatatataaaagagttttaattaattgggttaaaggaaaaaaaagcacttaaatactgtatcagaaaaatataaacttttttttttttttttttttttggagacagaatgttgctctatcacccaggctggagtgcaggggcacgatctcggctcactgcaagctccgcctccagtgttctcacgccattctcctgcctcagcctcccgagtagctgggactacaggagcccgccaccacgcccggctaattttttgtatttttagtagagacggcgtttcaccgtgttagccaggatggtctcgatctcctgaccttgtgatccccccgcctcagcctcccaaagtgctgggattacaggtgtgagccaccatgcctggccagaaaaatagaaactttaagcccaaatgctttttcaggttcatgtgacttaagtaaatccttaaaaaataagctagttttaaaattattggtaaaataaaatagaaatgccttcagaattgtcaacatacattattgtttagatttattggtaaaggagttcaatatttatcattacgagatactgtaagttgtcaaaatttggcatgagggttataaggcttgcaacacaaaagggaattatgtttgactaatttcttgataaataaggcatttaatattgtttaatggaaagagataaatcctgagttgctggcaaaaaaaaaaagaggaacatttatttaaccataaggttcttacttaggtaaacacctaaaattcacaggctataaaaatggttaggccaggtatggtggctcacgtctgtaatcccagcaatttgggagtctgaggtgggcagatcacctcagatcaggaattcaagaccagcctggccaacatggtaaaaccccgtctctactaaaaatacaaaaattagctgggcatggtggcaggtgcctgtaatcccagctacttgggaggctgaggcagcagaatcacttgaacccaggaggcggaggttgcagtgagccaagatcacaccattgtactccaacctgggcaaaaagatcaaaagaaaactccatctcagaaaaaaaaaaaaaaagaaaatggttaacagagaaataactttaaatgaagactatcacagttttctttcctttttcttttttttttttgagaagagttcactctgtcacccaagctcgaacgcaatggcgtgatcttggctcaccgcagtctccgcctcccaggttcaagctattctcccacctcagcctcccaagtagctgggattataggtgcccacaaccacgcctggctaattttttttttttttttttttgagacagagtctcgctctgtctcccaggctggagtgcagtggtgctatctcggctcactgcaagctccgcctcccgggttcatgccattctcctgcctcagcctcctgagtagctgggactacaggcacctgccaccacgcctggctaattttttgtatttttaatagagatggggtttcaccgtgttagccaggatggtcttgatctcctgaccttgtgatccgcccagtctggctaatttaaaaaaaatatttttatagtaggctgaggcgtgagaatggcatgaatctgggaggcggagcttgcagtgagccgagactatgccactgcactccagcctgggcaacagagtgagacaccatctcaaaaaaaaatttattttaaataaacaaataaataattacagatgtaaagatagttataaggagatatttttagtatgaaaagttaaaaggaaaataatttcatatgagaaagaatcttgtgtggtaaatttttgttctaaaatggctagttattttggaaagagggatgttcagaataaaacaggaagtccaagtatatcataaatggtttgtgtaagttttgataaagtttgtaaaaagctttttttttttttttttaagatggagtctcgctttgttgtctgggctggagtacagtggtgcaattttggcctatgtcagattaacaaggctttcttggagcattaacccactctttaattaaaaaaaaaaagttataaaaatgtttatggaaattatcttttttgtttttgaggcagagtttcgctcttgttgcctaagttggagtacagtggtgtgatctcagctcactgcaacctctgcctcctaggttcaagcaattcttctggctcaggctcccaagtagctgagattacaggcgcccacaaccatgcctggctaatttttgtatttttggtagatacgtggtttctccatgttggccaggctggtctcgaactcctgacctcaggtgatcgacctgcctcggcctcccaaagtgctgagattacaggtgtgagccaccgcacccagccttatggccttattttttttgtttttttttagatggagtcttgttctgtcacccaggctgaagtgcagtggtgtgatctcggctcactgcaacctccacctcccaggttcaagcagttctcctggctcagcctcccaagtagctgggatcacagacgcacactaccatgcctggctactttttgtatttttaggaaagatgaggtttgccatgttggtcaggctggtcttgaactcctgacctcaagtgatccgcctgccttggcctcccaaagtactaggattacaggcgtgagccaccacacccagcctgaaaattatatcttgtgctcaagatgattacaatttaatagatttgtttataaaattttagagagatttaattggccttatgctgtctttatcttttgagaagaaattccctcaaagaataaaggtttctacatttttttttgaaatctttgagttatctcagcaccataggaaaggtaaaaacagaaaaaaaaaaagaaaataaaaaaagaaatctgtgagttatcactgtggctaagtgaatgacttattttacaatgacctgtgatcctatttagtgatagcaactgttttaaaactttttctaggccaggcacggtggctcacacctgtaatcccagcactttgggaggctgagatgggcaaatcaagaggtcaggaaatcaagaccatcctaactaacatggtgaaaccctgtctctactgaaaatacaaaaaattagctgggcgtggttgcaggcgcctgtagtctcagctgcttgggagactgaggcaggagaatggcgtgaacccgggaggcagagcttgcagtgagccaagattgcagcactgcactccagcctgggtaacagagcgagactctgtctcaaataaaaacaaaaacaaaacaaaacactttttatatttgacaaacttkccaaaatcaaattctttcttcagtcctcattaatttttgtgtgtgtgtgtctgatggagtctcactctgttgccccagctggagtgcagtggcacaatctcggctcacttcaacctccacctcccaggttcaagcgattctcctgcttcagcctcccaagtagctggaactacaggtgcccgccaccacacctggctaatttttatatatttttttctttttgagatagagtcttgctctgtcaccaaggctggagtgcagtggcacgatctcagctcactgcaagctccgcctcccgggttcataccattctcctgtctcagtctcttgagtagctgggactacaggcgcctgccaccacgcccagctaattttttttttttgtattttttagttgagacagggtttcactgtgttagccaggatagtctccatctcctgacctcatgatccacctgcctcagcttcccaaagtgctgggattacaggcgtgagtcacctgcctcagcctcccacagtgctgggattacaggtgtgagccactgcgccaggcctcccaaggtgttgggattacaggcgtgagccaccgctccgggcctcccacagtgctaggattacaggtgtsagctgctgcacctggcaattttttgatattaggtcccctgaagtccaaaaagagatatatggcttatttggtataatgaaatcatacaggaagcattgttaaaggtgaaatggtgtttttcttgggattatatttatataaatgtgttgttagtgtgtgttccaaaattgtatgagatgcctgtgattctgatacatcttagtatatggtattagtagtaattatgattattatgtaaaattgttgtatgccacataagtaaccaaatttgcttgtcaattatgtcttttttttttcttttttctgagacagagtcttgctctgtggcccaggctggagtgcagtggtacagtcttggctcactgcaacctctgcctcccaggttcaagcgattctcatacctcagcctccagagtagctggactgcaggcgcatgctaccacggccagataatttttgtatttttaatagagacggggtttcttttttttttttttccctgacagagttttgcttttgttgcccaggcttggagtgcaatggcgcgatcttggctcactgcaacctccacttcctgggttcaagcaattcttctgcctcagcctcccaagtagctgggattacaggtgtacaccaccatgcctggctaattttgcatttttttagtagagacatggtttcaccatgttgatcagggtcgtctcaaactcctgacctcaagtgatccacccgcctcagtctcccaaagttttgggattataaatgtgcgccactgcacccggtcaagacagggttttgccatgttagccagggaggtctcaaactcctgacctcaagttatccgccctgcttggtctcccaaagtgctgggattgcacacatgagccactgtgcctggcctcaattatgtctttaactgtggctgttctaagacttttgtcatccacaattgttgttttacttttatcctttcacagagcagtttataatcagctatagaactctgaggtactcttcaatctaagtttctgatcacttttgagattgtgccattggaatagagcaaaaaacttccaagactctcattgagagctgctatattcatgaggattgttcatccaatattgggcaaaatgagagttaattttatggactaaactaatataagactgaaataatctttttatgtttttgcttaaaacattactgattctttctgttctttcagaaccaagaaaacttttttttttttttttttgagacagaatctcactctgtcgcccaggctggagtgcagtggcgccatctcggctcactgcaagctccgcctcccaggttcacaccattctcctgcttcagcctcccaagtagctgggactacaggcgcccaccaccgcgcccggctaattttttgtatttttagtagagacagggtttcaccgtgttagccaggatggtctcaatctcctgaccttgtgatccgcccacctcggcctcccagagtgctgggattacaggcgtgagccacggtgcccggctggtaacttttttaactttgagctatttgcagcttttagcaattgagtaaagtacactcctgtgaggaagatttggaacatatttctgttttcttttttgttttttatattttgcttgggtagcatatttctttctgatttctccaaaaattgggaactatctgtgagcactatttaaaaaaaaaaaaaaaacttttccctctcccttcccctatttgtattctaatgtcaatataatgatgtgtgcacgtgcagtaacaatctgttttctcttgtaataggacatagagacactgcatattttaccaaggctttgactggaatggcatgctttcaaatataaacagacggctttaaggaatcagagttgacctatagtgcccatcaaagcccttgggaaaactggcttcatactgtatccacccagtggattcttcttgcccagatggagcccatgtatcaaggtagggaaactgcaatagagaaagggtttaattcacacagagacaagtgaatgggagaccagaatttgatgattactgaaatcagtctccccaagaatttggggactagggtgttccaaaggtagtttgggggaaggggtggggtagcttggcagtgggtgcttgctgctgatgggttgtgggggcggggggccatcgtagggtgtgagacaggatcctcccgtgtgctgaaccgcttctgggtggggctgcaggagtagttggcaggtccaggtggagccatcatcagtcagtgggtcctgttggagccgtaggtatcagacatgcaaaaaacccttgcgaggtactgcaaaaggccaatcttaggttacaatagcattgttatctgcaggacctctggaataatggctgataattgtttatgtctacatcttagccaaattcaggctcctctcctctccctagcctggtggcccctcattagttttacaaatacagttgagttttggggaggggctattatcatgtaaactataaacatctcccaaagctagcccaagaataactgaaggcagcttgaaggctaaaggtcaaagggggtttggctacatcagatcttccccaattggcataattttctcaatgatacaatttttgtggccgggctcggtggctcacgcctgtaatcccagcactttgggaggccaaggcgggcagatcacgaagtcaggagattgcaaccatccttgtcaacacagtgaaaccccgtctctactaaaaatacacaaaaaattagccgggcgtggtggcgggcgtctgtagtcccagctacttgggaggttaaggcaggagaatggcgtgaacctgggaggcggagcttgcagtgagccgaggtcgcaccactgcactccagcctgggcgacagagcaagactccgtctcaaaaaaaaaaaaaaaaaaaaaagcctacatggtaaatatttattcttgctacagtttatacaaataaccaggccaagtacaataagactaaaacttattttgaaaacaaatcagtactacctgatttcactttggtaaaaataggagactagagagagaaaaattatgtttcaaaataaactatagtatacctgttattagattctagccttgcctaaggtttttcaacttttattattttctctttttttgtttgtttatttgttttttcagacagggtctcactctgtcacccgggcagtggtgtggtatcagttcactgcaacctctgcctcctgggttcaagtgattctcgtgcctcagcctcccgagtagctgggattattggtgtgcaccactatggccagctcatttttttgtatttttagtagagatgcgtttcaccatgttggccaggctagtctcgaactcctgacctcatgatccaccggcctcggcctcccaaagtgctgggattataggcatgagccactgcgccgggccaaagccgtgcttttcttaaagctctgcgaacgaaagctagacaacttaaacctcagaagagaataatggtacctatttatatacataaaccactttcacgcctgcctgctgtgtatggacttcagaggaacacagcctacgtcagttttctaggattgttctctccacgtgctctttgttttctttctttcttcttccctctattttcctccctccctcccttccttccttcctttcacaaagtctcactctgttacccaggctggagtgcagtggcacgattttggctcactgcaacctccgccttccgggttcaagcgattctcctgcctcagcctcccgagtacctgggactacaggcaaccaccaccacacccagctaattttgttagttttagtagagacggggtttcaccatgttggccaggctggtctcgaactcctgacctcaagtgatctgcctacctcggcctcccaaagtgttgggattataggcatgagccactgtgcctggtcacaacacctgcattttcttttttttttgtttttttttttgagacagagtctcactctgtcacccaggctggagtgtagtggtgtgatcttggctcactgcaagctccgccccgtgggttcacaccattctcctgcctcagcctcccgagtagctgcaactacaggcacccgccaccatgcctgcctaattttttgtattttttagtggagatggggtttcactgtgttagccaggatggtctctatctcctgacctcgtgatcgacccgcctcagactcccaaagtgctgggattacaggcatgagccaccacgcctggccaacacccccattttgtataccacactcaactcccccattttctacatgctgatcaaaaccaatctgaatggagtctaggtctggctgtgggctgttgggaagaggcccccaaatctggccatcaactggccgcaaaactggccataaacaaaatctctgctgcactgtgacatgctcatgatggccatgactcccacactggaatgagggcaaggaacacctggcccacccagggcggaaaaccgcttaaaggagttcctgaaccacaaacaatagcatgagcgatctgtgccttaaggacgtgctcctgctgcagataactagccagacccatccctttatttcccgtaagaagtgcttttaatctataatctatagaaacaatgcttatcactggcttgctgtcaataaatatgtgggtaaatctctgttcgaggctttcagcttcgaaggctgtgagacccctgatttcccactccacaccctatatttctgtgtgtgtttctttaattcctctagcgccgctgggttagggtctccacgaccgagctggtcccgcagtgggcagtggtttgggcccgaccgagctggtcccgcagtgggcggtggtttgggcccgaccgagctggtcccgcagtgggcggtggtttgggcccgaccgagctggtctcgcagtgggcggtggtttgggcccgaccgagctggtctcgcagtggtctcgcagtggtttgggccctgcttgctcgactggatttcaacagtgaagccagattagaggacatgctggctgccccgatcctggacctggaccaatggtgcttcctaaacattccatgtcaacttttctttttccaccttccagggctgggctgtgaaagagattggagaggcaggtgcctgtgagagaagcttctaccagcctgggaagtcaggtcttccatgagtgaggggaggtatctactttgccaaaccttgttagrgaatgctgacatagctgcctcttcctgcccagaagctaagcttgaatgccacccctcacagagcttctctcctgtctttcactcactcctgcttatttctgtgacagaacttgacagcatggacattgccacttgcttccttcagtctcctggagtccccatgtcctgaacacagaggaggcacccaaatgcttgctgaagccacatccctggaccaagtgacctgaccctcacctggaggaccttcaccttcacctctcacctggaggaccctctcacctggaagactctctcacctggaggaccrccccacctgaaggactcccaactggaggaccctcttacctgggggaccccctccgctggaggaccctctcacctggaggaccctcttacctggagggcccttcacctgggggactcccccacctagaggatcctcttacctggaggtcccctcacctggggaaccccccccccacctagaggatcctcttacctggagggcccttcacctggggaaccccccccccccacctagaggatcctcttacctggaggaccccccaccgagaggaccctccccccccacctggaggacctccccacatgaaggactcccacctggaggaccttcttacctgggggaacccgtctcacctggaagaccttcacctgggtaatcgccgtggcctcccactacggcgcagccgggtcggctgcccgggcttcaccctaaaataaggcccgaactgcagcagtcggagccgatccctggagcccagcgcctagggcggacccgcgggagcgtctcttggtaaccgttgctaaggagasgaagcccgggaaggagctttcgcgcctgcgccgcggggccgtccgcgtctgcgcctgcgcgcaagagaggcggggccagcgctcggcatggcggagccagatctggagtgcgagcagatccgtctgaagtgtattcgtaaggagggcttcttcacggtgcctccggaacacagggtgcgcggggtgccacccgggcagctctgcccgcctcgctagcggcactgcccggctgggtctggggagcctcgtgtcgcgctgccgcgccgaggcttccggcacgggcgggaacgacagtcccagagttccccgcggcgggggcggaagccggggcggggcgggctcaggacccccgacagccggtccctggagatctgaggggccggggcgggctcagggatgcctcgmgcccgcggagagacgggcccgggacttgggaagagcaagctccgggatccagctcgggcgctgctgggttcagcgcccgagctgggctttgcaggctgagccgcgagccacttgtttgtggggagaatttacayccgcgacgagttcgagcttgaaggctcccgctgggcttgggctgcatggagcggggtccagcgctgcctggcggcttcacgcgaaccctgggcgcgtcccttgcggaggtgccggtgcctccctctgcagagaccaggagagagcctctgggcgttgggcggtgttgcccaggtgcacggctggtgggggtggagagccctgaactttggccgctggtttgtgtttttaactgctggctggtgctctgagaggccaagccacgtgttcagtaagaatcattaacagatcgtggctggatgacaacaggagccacactttactcatccagacgtgcagcaggcgctcaccgcgttgagagccgtgtgctggactctggggtgaagtagtgagttggccttttcttttttgttgtttttttgagacagggtctagcgctctcgcccaggctggaatgcagtggcgtgatcacggctcagtgcatcgtcagcctcctgggctcaagtgatcttcctgcctcggcctcccaagtgctggaattacaggcgtgagccaccgcccccagcctggcctggcatttctttgagttcaggaagtgtgacaaggatttggacacccagaaataagcgtgtcgagaagagcacaagcagaggatgtgagaaggggaattaaggcgggaaagggagkttgagactaggccatcagtgagtgacaggccagatgcttctgactcggtccccaggtgtcaggaaggaatcagactgaggacaaatgcggccagtggctcacacctgtaatctcagcaatctgggaggctgaggtgggaggattgcttgagcccaggtttgatactgagggttaagagaagggaagccgggaaatgggggctgtgaggtttcaaaccttgctacgtgtgcttttttttttttttttttttttgagacggagtctcattctgtcacccaggctggagtgcagtggcgcagtctcggctcactgcaagctccacctcctgggttcacgccatcctcctgcctcagcctcccaagcagctgggactacaggcgcccgccaccacgcccagctaattttttcatatttttagtagagacggagtttcaccgtsttagtcagggtgctctagatctcctgacttcgtgatccacccacctcagcctcctaaagtgctgggattacaggcgtgagccactgcgcccggcttacatgtgcttcttagatccatggagaaggatacagactctactagttcagagaccccaaaatacagggcctcaagatgatgccttttttcactctcccctaacattctggagagaagcagttgttttgcacaggtgggtcaggcattctggttccattttttcttcccgtcactgaggtgagaagaggtgaaagcttcctttcacctggaagtcacacggtcccttcagctcacattccaaggccagatgccactgggtagcgtttcataacttccaggaggtagtgatacagggatgctgggacagcagcctctgccacagatgtatttttgtatgtgggattgaaagggagtatctgagtggccgcctctgatatttctttcaaagcattggcccagtatcgtcaccaccttttctcatcagaraagcccaagaggccgggtacggtggctcacgcttgtaatcccagcactttgggaggccaaggcgggcagatcacttgaggtcaggagctcaagaccagcctggccaacatggtgaaacccagtctctactaaaaatagaaaattaggcggttgtggtggcacctgcctgtaatcccagctactcaggaggctgaggccggagaatcacttgaacccaggaggcggaggttgcagtgaaccatgttcttgccactgcactccagcctgggcaacagagcgagactcagtctcaaaaaaagaaaaaaaaagcccaaacgtgtggttgcctttctgtttggtgagcaagacgtgagtgggctccctggtacaaattccatttgaaatttcctcagttgttccatcagctgccaaatttccacactggcaacacccttctgtttcagctgggacgatgccggagtgtgaaggagtttgagaagctgaaccgcattggagagggtacctacggcattgtgtgtgagtggccaaggctaggacatgtggccgcagctcgtggctgtgacagtgtgggacgagactgtcgaagcagcagccgcgttggggctggaagggactcagaccctgtgctctgaaacagggcagaaacctgttcaggaacttcaattcctgatgtagttatcacaaacrttgtaccatttctgggtaaacgtaagcatccggttgctaatgcccataatccaaacgtgtcactgcagagtacacagaactgttagagaaataaaatacagaactttccagaagcagcaggagctggacatggtgctcatgtctatcacctcagcaactctggaggagtcacctgagcccaggtgttttttctttttgtttgtttttgagatgggtcttgctctattgcccagactggagtgcagtggcatgatcatagctcactgcggcctcgacctcctaggctcaagtgatcctcccacctcagcctcctgagtatctgggaccacaagagtacataagcacacccagctaatttttaaatttttggtagagatgggatctccctatgttgcccaggctggtcttgaacttctgggctcaaatgatcctcctgcctcggcctcccaaagcactgggattacaggtgtgagccactgcacccggccaagcctaggagtttgaggctgcagtgagctgtgatcacgccactgcaccccagccttggcaacagagtgagaccctgtctcraaaaaaccaaaaacaccacacacaactaaaggttataacagatgtgaaattggcgtaggtcattctggaagctgcacacattagcaggatgttttgtagagccatcttcacacaaaataaggtttgcttttttctgcatagagtaccttatttgcttttaggacattacaagagagcacaaagcagtgatctgcatgctaaggaggacatggagagcctggagccacagaactgagtggctggaggccagggtccagcacagagcaaagttgggcaccccctgcccagttcaaakgaggaaaccctccgggggaacgcgtctcgggctaggggcgttgcacagagtggggactgagtgtcactgggcatgaggttgtcagaggaaagaacggggacccctgtggctcagggagagcctcccgttcagcgctagggagcccacgaggggcatcgagatgatgtcatcaccaatgtgtttccattccagatcgggcccgggacacccagacagatgagattgtcgcactgaagaaggtgcggatggacaaggagaaggatggtgagcaggaaattggggtgttgggacctcgcactgggaggaggcagaaggatgtgagttacctgaagtttcctcagagcgactgcacggtgcttgtagcgggggccggcctctgggagggttctggtgtggcccagcacatcacccccaggtccacacgcagcctcagctgtctgccaggagggctctgcagtctccatcccctcctccccctcctgtctggtgaggccacctcactgcaggctcagctctgctgtcccctccacccccagcacctgcctgtgcaggcagggccctgccatgccccacatagatgtccacggtgtttagagaggtgccgattcgtatttggtcaaggaagagttaaaagtgcttattgggccgggcatggtggctcaygcctgtaatcccagcactttgggaggccgaggcaggcggatcacctgaggtcggcagttcaagaccagcctgaccaacatggagaaaccccatctctactaaaaatacaaaattagccaggcgtggtggcacatgcctgtaatcccagctactagggaggctgaggcaggagaattgcttgaacccgggaggcagaggttgcggtgagccgagatggtgccattgcactccagcctgggcaacgagcgaaactccgtctcaaaaaaaaaaaaatgcttattggggtcgccccarttctccctgaggtggggacactgcagcacctgctatcaggtgttcgtgaagcccaagagtggctggggttggggcttccccgccatcactggggtggggctcgctgaggccacctccctccccaggcatccccatcagcagcttgcgggagatcacgctgctgctccgcctgcgtcatccgaacatcgtggagctgaaggaggtggttgtggggaaccacctggagaggtacgtggtctcctggtctgcacattgggccctagggagcatgtgtcttgggctagaggtgttgcacagagcgaggactgagtgtcactgggcatgaggttgtcagagaagagatgaccccacctcaccgcctggctcagcccattgtctgagggggacacaggttgtcctgcccatgtcccctcctgcagcaggggaggctccacttccaccccttaggagaaggccggagagtggcatgcatcttctgtttcttccagcatcttcctggtgatgggttactgtgagcaggacctggccagcctcctggagaatatgccaacacccttctcggaggctcaggtgcgtggcagaggggcctggggtgggggaatgggcttcatgggcccttgtggtgcacatttataacgaaacagggcacttggggacttgaagagctgctgctgcctctgcctccacctcccagtgtttcagcgagcttcagtgaggtggaattcctgtggtgggggcatctgctgggagcgggcagccccagggccgagagccttatgagggcactggtttcctgggctgttgggagcaggcagccccggggctgagagccttctgagggcactggtttcctgggctgctgggagcggggagccctgggcggagagccttctgagggcactggttttctgggctgctgggagagtgcagccccggggccaagagccttgtgagggcactggtttcctgggctgctgggagcgtgcagccccggggccgagagccttctgagggcactggtttcctgggctattgggactgctagtcctgctggccagtgtgggtgtggcagggcccagctgggcttccctgcaggctcaccctgactggtacctctgaccctctgcacaggtcaagtgcatcgtgctgcaggtgctccggggcctccagtatctgcacaggaacttcattatccacaggtgggtgacagctaggcagagttggaagcacaaattcggctgaggcctractctgctgcccctgtggagttactaaaagctcaggggttcccagctgcagcagcctgcccgctgctcgcactccatttgtgtttttttctaaaatagagaaggggtctctctgtgttgcccaggctggtctcacacacttgggctcaagtgatccacccaccttggcctcccaaagtgctgggattacaggtgggagccaccacacccaggcatgcactccgatttttaaaaggtccaaacatcaacagcatgtaagagttaatgaaaaaaaaaataataaagatactacgccgggcacagtggctcacgcctgtgatcccagcactttgggaggccgaggcaggcggatcacgaggtcaggagatcgagaccatccttgttaacacagtgaaaccccatctctactaaaaatacaaaaaaattagccgggcgtggtggcgggcgcctgtagtcccagctacttgggaggccgaggcaggagaatggcgtgaacccgggaggcggagcttgcagtgagccgggattgctccactgcactccagcctgggcgacagagtgagactctgtctcaaaaaaaaaaaaaaaagatactaaaaagcccaaagctgaggaaacgtgcaggaagtctacgggcattggtgccgtgggggagctctcagcccctgtggccctctgggagccacctgccactgtttttccatcacagggacctgaaggtttccaacttgctcatgaccgacaagggttgtgtgaagacaggtgggtgcaacttgggccaggccctgtccctagatggcacttggtgacacacactcccctctctgctgcagcggatttcggcctggcccgggcctatggtgtcccagtaaagccaatgacccccaaggtggtcactctctggtaagtccttctgaagcatggtggcccctggggaccaggcctgtctggtggaggtctccttggggatgtcaggccgaagctgcaactggccttgggaatgttaagctacagggtctgtgcacactcagaaacgttgggtctaggacagcctccaggacacagcagggctgtgccacaaaatggtgagagacgggctcagtggcgtcaagggcctgcctagatcagacacacctcgccttgagagctggaaacaccgtggccgtgaaaccatctctggagggaaggctgcttcacnggactgaaggacaggcagcttgcatgctttccctggttcttcctcctggatacttttaaccaaacagggtcatgcttagccagggctgaatatcagagttggtcagaatcaggtcaggaccccagtgtcgtgtactccccatctgagaacgggttggtagtggctggtgtggctgtgtgccgagggtccgtggtccctgcgactctcaggacaccgctgcacgtgacagctctcgcccccggcaaccattgctgtgtgtgccacctggatctgcagggcctggggcagagggtggtccgagttgggacaggtttccaggccascacaggctctcggggaggctgtgtcctgtggaggcctgggctgggggagaggagccggctgtattgaggtgggtgcttctgtgtgtaggtaccgagcccctgaactgctgttgggaaccaccacgcagaccaccagcatcgacatgtggtgaggagatayggttaccgctcctggggcctcaggaagggctgggacaggagccgggtcacctggttcctgagctcagcctcaggggaggggcaggagtgcagtggggtctttgccagcctcccactcccagggaggtgggcctgagcctggaaacccaggaggaggtgtgagaacttagcttgctgttctcaggctgggagcacagaggtctggaggaggcacgcctgcccctgcacttgtcaccccgggaggcctgcggggcccaggaggggagccagtggtccctgcctgtccttcacagtgtccctgacccagcgtgcctcacactggcagggtcagcaaaggtctggctgcagtcaggtcctctgttcctcgcgctggcggggtcagcagacgtctggccgcagtgaggtccactgttctctgcagggctgtgggctgcatactggccgagctgctggcgcacaggcctcttctccccggcacttccgagatccaccagatcgacttgatcgtgcagctgctgggcacgcccagtgagaacatctggccggtgggcgtcctgggcagacccgcagcccccgcccgtgcccacgccctctgcgcccgcagcccccgcccgtgcccacgccctctgcgcccgcagcccccgcccgtgcccacgccctctgcgcctcagctcctgcctcccatagggcttttccaagctgccactggtcggccagtacagcctccggaagcagccctacaacaacctgaagcacaagttcccatggctgtcggaggccgggctgcgcctgctgcacttcctgttcatgtacgaccctaagaaaaggtgctgatctctgcacggggggcagggaccctcaccacccacactgtccagaccgtttcccagagcccagcctcactgcggtggagaggcccctccccaggcacagccgctcggagtggccacctggcttcctttgagcatttgaatcacaggctgctcagctgggtgggaggtgaggaagccgcactcacaagtcgcactaacgcaggctgcctcctccagggcgacggccggggactgcctggagagctcctatttcaaggagaagcccctacgtgagtgtgcagggttcctgactcgctctgtggggtatggctgggagcccgttttgcccggggtgggtggtggagaagtggcctgctgccctcactgacggcacaccctttctggggtaagaggacaggggcatgtggaggcacagacagcccagggccaggtccagaggcagagctggactcagacctgggcctgctcctcctatctggggccctgccccgcccagcactgaacccttctccctgcagcctgtgagccggagctcatgccgacctttccccaccaccgcaacaagcgggccgccccagccacctccgagggccagagcaagcgctgtaaaccctgacggtgggcctggcacacgcctgtattcccacaccaggtcttccgatcagtggtgtctgtgaagggtgccgcgagccaggctgaccaggcgcccgggatccagctcatccccttggctgggaacatcctccactgacttcctcccactgtctgccctgaacccactgctgcccccagaaaaaggccgggtgacaccggggggctcccagcccgtgcaccctggaagggcaggtctggcggctccatccgtggctgcaggggtctcatgtggtcctcctcgctatgttggaaatgtgcaaccactgcttctygggaggagtggtgggtgcagtccccccgctgtctttgagttgtggtggacgctggcctgggatgagagggcccagaagaccttcgtatcccctctcagtcgcccggggctgtcccgtgcatgggttggctgtggggaccccaggtgggcctggcaggactccagatgaggacaagagggacaaggtatggggtgggagccacaattgaggataccccgagactaccaggagagccctgggctggaggctgagctgcatccctgctccccacatggaggacccaacaggaggccgtggctctgatgctgagcgaagctataggctcttgttggataaaagcttttttaacagacatggtttcaccagcgtttaatgtgctctgatgttgaccgtccctctgagtgttctggggaggagggggtggggcggagggtcaggaaagcaggctcagcttccagggtcagggagttgtgggcccagaggggctgtcacagtggatgcaccctgccctctccctcgccagacccgagggtagggcagaggcacctcctcgccagcctgtgggctgcacccacagggaatggaggggaggggcaccattaccactggacccaccaagaccccgccgcctgggcgggctgtccacaggcccttccgcccagcagcagtgacgctcagggccttcccagctgtcagccactgcccgttcctgcgcctctcgtgcacctccacatctggtttgaggtcaggtcatttcctgtctgtgggcccagctgctgtgacacccaaggggagggccggcgyccccgaagccaggtcagccgtgcacccggcagagccccgcagattggcyccagcagagcttggggtggggggagctcggtgtcaccaacaggcccttgaggacactcgtgtggagaatccctgggacacgtggaggacccccaastcctgagccccgtactccgtactgcagggagcaggccaggagccacgggccttggggcacagggtccttctcagggacaggttcaggcactggctggaacaggctggacccctctacccagcacatgtgggcatgcgtctgggttccgagggtggggaaatgtggaaaggctcctgctggccggcttaggcctgctgcccttggagccttccatatacagagagtcccacctccagcaagggttggcctggactctccaaccccctgctgtgcccaggactcccccagggacaaggcaaccagaggcccagacccctccccagcaaagagaagcaccacgggagctgtctcccaagagcccttgacctggggcccagctggcctagggccgggccccggggctgttgtagagcagagtgtccatctgtgcacgctgtagccacaagcgccgctgggcgtcgccaagcagcacacgcagcgagtggcctggacggcaggcgggcagggctgcacagtgggcagcatgcagctggcgacaggtgtcgcagcagagggtgggcagggcgccaggggacaggcagctgtgtgcctggtagcctgggggctccgagacagacctataggctgaggctggtaccccctctgcccgaatacgcctcgggctggccgctgcagagctttcaggggtggccaggtccccaggcctactcagctcacggcgcagagagaggaaggagaaggcggaaggttcaggttccagcccctcctccaaggccccatatggtgggctgctggcctgcggcagctcctcagctgggggctcccaggcccggcccccagtgccccacagtttggcactctgctcccagagtggtggcctgtaggccagctccgccgggggcgagtcagggcctggtgacggctccccatacaggctggcgtcctccgacccctcgtcttcctgcaagtcccggtataagtccagtggggccctgtaagcagcaggggagcctcgggggggcaggggtggcggctcctcatcctgggccagccgctgctgcagccaggccacacaggaggccacgtccccgctggcacgccgtgcctgcagcagctcctcagctggcagcacactggtgcccagctgggccagcacctcacccaggatctcacactccagccggagggcgaagcagcccagggccacctgcaccagctggcaggcggggggcagggcggtcaccatgagccgatggctgtctctgcgtacgtagcccatcttctggaagctcttcaggaggaggtcgtctgagagcacacccttcagcacgtgcacgtagcccccagagaaggtctgcaagggagcggccaggtcagtgactgcccaccctcccataggccagaccctagggtacagtgggtccgggatctgttggctcaggccttggcagcttctgatgctcagacccaaccccagagactaggcttagccagcttgggccaggcccaaacatgatgatttctttttttttttttttttttttttttttttgagacagagtcttgctctgtcatccaggctggagtgcagtggctccatctcagctcactgcagcctctgcgtcccaggttcaagcaagttcccctgcctcagcctcccgggtagctgggactacaggcgcccaccaccacacccggctaattttcatatttttagtagagacagggtttcaccatgttggccatgctggtctcaaactcctgacctcaagtgatccgcctgccttgagctcccaaagtgctgggattacaagcgtgagccactgtgcccggcctagaatttttttttttttttcttttttgagacagagtctcgctctgtctggagtacagtggcacgatctcggctcactacaacctcctcctcccgggttcaagcgatcttcctgcctcagcctcctgagtagctgggattacaggtgcgcaccaccacgccccactaatttttgtatatttagtagagacggggtttcaccatgttgaccaggaaggtcttgatcccttgacctcatgatccacccaccttggcctcccgaagtgctgggattacaggtgtgagccaccgcacctggccgaatttcttaaatttaatggaaaaaacaatgaatacattaacctagctcacaaatcagaacaaaatgaagagcccctgtactgagaaattccactgtcttctgtcccaccgctcccttcacccctggagatggcctcatctaattagttttgaatgtacttgcccaggtgtttgttttgcaaacccaaatacagatttcgtttgctcctcgtatgaggtagtccccccttttttttcacctctttgtaaggtctctaaccaaagctagacaggtagcctcttaaacgtgttgttctgaactttgtttttttccactacagtcttgcagacaaggacagaagctgtaacgttcattccccctgctgtgtagtattccaccatgggggtgacacgtctgttttcagcgctctccagaggctgtccatgcactgggctgacagccgtgggacggtagaagggtgagtgctcttttttttttttttttgagacggagtctcactctgtcaccaggatggagtgcagtggctcgatctctgctcactacaacctccacctcccaggttcaagtgattctcctccctcagcctcctgagtagctgggattacaggcgcgtgccaccacacccagctcatttttgtattttttaatagagayggggtttcaccatgttggttaggctggtgtcaatctcctgacctcgtgatctgcccacctcggcctcccaaagagctgggattacaggcgtgagccaccgcgcccggcctggctgagtgctttctagcctacacttaggtgaagaactaaaggagctcaggacaatcactgcgagcgtctcctgactctcaaattccctaactccgggactcctagcatctaatgcctggacacggcccacgtgtggagcgcccagtgcctgcagcactgagctcggggctttgattcattcctctggccccatgaactggactgttcccgtgtcgctgtctcaggaggaaaggggctgacagagattagctaatttggccaagtcctcgcggccaggaagcagcagaactaagtccaaaccagggctgtccsgcactgaagccggttattcccccgccccgccccctgggaggcctcaagggcgggcctgtccgtcctctctcatgaatgaaagtcctggcgcctccgaccagcaggtgtccccggggagccgcggagagactgccgctgccatggcaaccggcggaggcgtagctcgcccacgtgcccagtgacgtcatcggcttcctactcttccgaattagctcagagctcccggcggccctgccccctcctgccgccaggagctcacctggagaggccaggccagccctgggcacagcctcccgccccaggccgtggagttcactaggtctgagcccagccctgagacttcacagggatgcacccatctgcagtcctcccagcctcggcggcctcctctgcaaatgggattggcccataacctggaggaattaggatgaccatgggaactcaagtcccttctgtgcccccgtcctaagatttccatggcaactggggccgcgaggcctcttagggaagacactgacgcaagctctcagggcaggaccccgtaggcagcacccaagcctgccctcgcccaccccatgttctcagccctaggagtgggtgcccccacacgcccacgacccctcagcgctcggagccttgaggagcccaccaggcactgaggacacttgaagcccctctctctcgaaaggcgtggtcccccatggtcggcggccccgcgacccgcaggccaggacgaggggcgcgctcctcctggcctggcgcctaccttgatggtggtgaactccttcctccagggcagcaggtacaggtgcaccgcggcgagctccagaagctcgaaggcgcgagccaggccgcgtagcgcgggcgccaggtcggcgcggccccacagcccgtcggtgagcagagccagcgcgtcgtcctgcagcgccccgtgcaggtcgaagtcctccaccaggatctgccagagcaccgcgcgcagcgaggggtccccgcacacgcccgcgcggccccgtcgcagctcgcgctccaggcactggcggtagtcctcggacagcgagctgctgcccatcctgcggcggacgggggtcgggggggtcagggacctaaggccgcgcccagcccgccgcgctctccccgaaccctcacccagcgtccccaggacccctcgagcctggagaccccgcccccagcggctgggcgcccccggtatcttcggcaccccctacgctggagacctcggccccatcagctgcccgcccacccagcgatccaggcccctccagttgagcgcccccgcacctccagcccctccctccagcctgggtacctcggccttccaggggcgcccccggttatcgaccgcacccttctctagagacgcgcttccgcccgctgagccctctcccgaccagagccccttcgcccggcagatggagctgcggatcccgcgggtgacggcgctacctgtctgtccccagcggtctccggccgccgcggatcagttcgggcctccccgcgcgccgcgcgcttccgccgggagtcggctccgcccggggtccgcggccgtgacgctgggggcggggcggggcttggcgcaggccccgcctccgaataatttaggaggggcggggcctggtgaaaggggaggaggaggtgtcagcccggccgagcccctgcgcgaggcaccccgagagcctcctgtcaccgcgtcgcccgtctcctcgcgggaccggtatcgttcacgacgccgctgggccgagggctgcgggctcatggcaggcgctcagggaacgttgtgcctgggccgctcctccccacgagacagggacccagccccaggcgacccggccgcggggaagcaggtgcgcgggctcgtcccctggggggtggggccaccggcattacctggcggggattggctggatcctgggaagagcctttcctgcggggcggggccacctgcattacctggcggggattggccggatccgggggcgggcctcccctgtggggcggggccatccccttgagggaggggcccgcggcacggaaggtgggcggaaggacaagcctttcagcctcgtctgaaacagcagcctcaggtggatgcggggacctcagattctgtttatgctggctccgcttcccggcctcctgcacttgccatctgcagcccttgagagcatcgtctgggcgggtctctgaggcagggcgaagccgcccccctctctaggctaaaagctgacctgggctgcggatccacccaggctaaatctgggccacgacttcccggggacgttttcttcgctcgggttcctctgttctgtgctacagccactttctcgcattgcccagaagtagaggaggatgagggagacccttggaggtcccagccgaaacccacccctaccccacacccccgctttgggcaggctttgctacttcacgtctgtgtccctcatctctccaggccaccaaaaccaaggcccaagtttgttgaaactttccctgggcctgggcggcgaggtcccccctttttcttagattttttacctggaagttccctgctggcatcttagaaatagtgatcatgaccgggtgcggtggctcacgcctgtaatcccagcactttgagaggccgaggcgggcggatcacctgaagtcaggagttcaagaccagcctggccaacatggtgaaaccccgtctctattaaaaatacgaaagttagccgggcgtggtggcacatgtctgtaagcccagctacttgggaggctgaggcaggagaattacttgaacctgggaggcagaggttgcggttgcagtgagctaagatcgtgccactgcactccagcctgggtgacagagcgagaatgtctggaaaaaaaaatcgtgatgcagtcggtggatctccctgagttatctaggtggccacctctggacagggagctcttttacttactgtttactgaactcactcttggtgcccagtgccaccatgggtccacaccagtcctcaggacagctaacttcgtaagtctcatctttattcttcttctgatgcggaggagggtggaggtaactgttctgcctttgtcctcactgaatttggcaacaccagtccatccatccagcagtgggcctagctctcctcccataggcctgggtgggtttttgcacctgcctcaacccatggaatagaactgatgtggaatgaattccaaggctaaatcataaacatgccataccctggccttgtcttgagatccttggcctctgacatggtttggttctgtatccacacccaaaatctcatcttgaattgtaatcccacaggtctggagcaggaccaggtggagataattaaatcttgggggcagcttcctccatgctgttctcgtgatagtgaattccacgagatccgatggttttataaggggttctcccctttgttcagtgctcattctcgctcctgtcgccctgtgaggagacgccttctgccatgattgtgagtttgctgaggccttccccagccatgcggaactgtgagtcaattaaacgtcttttctttataaattatccagcctcaggcagctatttacagcagcatggggacggactaacacaccctcagaacccagccactagagtgagaaggccacggccgtgtgcagagcttttggcctgcaacttcgacctgcgactcacattcacctgcagcctattcttgggacttttttggaaatagtttttccagacaaaaatcaagatgagtttgttctgggccgagcgcagtggctcacgcctgtaatcccagcactctggaagaccgaggcaggtggatcacgaactcaggagatcgagaccatcctggctaacacactgaaaccccatctctactaaaaaatacaaaaaattagctgggcgtggtggcgggcatctgtagtcccagctactcgggagactgaggcaggagaatggcgtcaacccaggaggcggagcttgcagtgagccgggatcgcgccactgcactccagcctgggccacagagcaagactctatctcaaaaaaaaaaaaaaaaaaaggatgaggttgttctgggttggcatgggccctcaatccagtatgactgctgtccttatgaggagagagaaacttagatatgaacgcacaggagagaagaccgcttaaagacggaggcagagtggaacgagggtgccgtgagcgaaggtaacacagctgtgttagagccaccagaaactggaggcaaacagaattctaccctaaagcctccagagggagtcagccctgctgacagcttgattttgacttcaggcctgcaagatggtgagagagaacatttctgttgctgtaagccacccattttgtggtcgttttggcagcccctggcaacacatccagtcctcacgtcgtcgttccgacagccctgaatgaggtcccagccgacagctggcaccaaccatagacagcagacagctcttcggatgaatccaacccctggtcattgggttaccacctagaaacagcctcccatgatgctgaggagccatctggctgatttttgtactttttgtattttcagcagagacagggcttcactatgttggccaggctggtctcaaactcctgacctcaggtgatccacctacctcggcctcccacagtgctgggattgcaggcgtgagccacggtgcccagcctaatttttaactttttagtagagaggggggccttactatgttgcccaggctggtctcaaactcctgggctcaagtgatccccccgcctcagccttccgaagtgctgggattccaggtgtgaaccaccatgcctggcgtcttgagtatttaagcccctgagttggggtagtttgttaggcagcggtggctacgtgggctgtacacattcacggctccctcccttcctgcccggggatggacactccatgagctgccgtgtggattctccgtccttccctgccctcccgggacagacactccattgcctccactgcatatacatcctctaaaaccggcagcagccttgccaggtcggaggttccgtccacacttacctggactccaggactgcacctggtcccctggggccactgccgtgtccaccccacagtgtgcgtgagctccctccccctcctgtactcagcatcgtccagcttcctcatcttctccggtccaatggatataaggttacatcttgtttacttttcatttgatttttgttatgatttggacactgcttatgcagaatagttttatttttatttttttttagatggagtctcgctctgtgctcaggctggagtacaatggcgtgatctcggctcactgcagcctctgcctctcaggttcaaacaattctccggcctcagcctcctgagtaactgggactaccgccaccacgctcagctaatttatgtatttttagtagagacggggtttcgccatgttggccgggctggtctcgaactcctgacctcaaaagagccgtccgcctcggcttcccaaaccgctggggttacaggcatgagccactgcgcccagccattactttttattttatttttattttttgagacggagtttctctctgtcgtccaggctggagtgcagtggcacgatctcagctcactgcaacctctgcctctcaggttcacgccattctcccgcctcagcctcccgagtagctgggactacaggtgcgggccaccacgcccggctgattttttgtatttttagtagagacggggtttcaccgtgttrgccaggatggtctygatctcctgacctcgtgatcygcccacctygrcctcccaaagtgctgggattacaggcgtgagccaccgcgcccggccatttgtaggatttctaaaaggaagctgctattattcattcctgtcttatgggggagctgcaggctcagcgagggcaaagctgcacagcaaacagcagcacttgaacatgtctgccgggtctcagcgccagggatacagctgagccaggacgttcccrgcccccacagtgtgcaggctgcaggtgtggccccgatgccaagccagcaggggctcccacgccaggatttgttcaagacacagctcatctccaccattctatgaagcggactttaaaatcccatcttctagacaccaacgctgaggccggagcagcccaagctccaaggcaccgtggccagctggggttcgtatcgagggctggggcagatgctccagctctgccccacccagagagacacttctgtctccctatggggtccttggcgggtaaaccagcccctgctsagggtgcaagcacagagcatcccaccgaggtccacagctactgcttttaagactgtttccctgagaacagcaacactgccccccagccagctcctggtagcatctagggttgggacctcccaccccaccagccctgccacctgcctcctcatggcatctcaaggtgccaggggtgcctttcttgcagaagagccctccatcctgatctgcccacaccgccctggcagatgctgtccacgcccggcagccttctgtgcacctcagagcatgtgtgtgtcgccatgcacagaacgatgattcctgagaccctcgggtgactgctctgggctcaggtccccagtgatgacctggaccccagcctcaccccacccttcccacccactgatgccctgcagagctctcctgtccaagagggtgaagcccacacctgcctggccaggcacagccccaagaggaccctgcttctatgcagagggtctcggaggctggcagatgttcaagaggttgggccaggcttggtttggggctgggctgtggctcgtcccccacatcctcagcggcctctgccatgggcagcaggggtggttgtgctgcctggccagtggggtggggattgagggagccacacggcgaagcacagcagtgagctctttattttaggctgggtgggggcagcatgtgacagtcaagagggctgacccttgggctgcacggacctagataagatgcccagggtcccggaatgttcacagcccacagccaaggtgagtaaggggcagggaatgtcctgggctcagagcccgagaccctgcaggggtgtccctgcccatcagcaaacagcataccctgacaccagctgcaccccaggccccagccggcccttgttcctgacccagacaagaaactagttcatggggctacaactccccttctaggggtcagaggggagagaaactggactgccgtctccactgctggccggctcatggccccctcttccctgatgctccccaggagctgccccagccagatgttcatcgctgagcctgcacccaccgaagcccaaagcttcccttcttggcctctctgaggcctacacaggagagcagggcctggttcctcctggagctgattcagccccattctgtcggggcagaggtgccaaccccaagctccagggtcagatgtgaggtgaggaaggtgaagagctggagagcacaccacagtggacaagcccccaccatgtgcagagcagcgtgaggctccaggatggtcctcagtagatcccatggctccaggtgtaggagagacagccctgggaggcgaggccaggccctgcagggaccctgggctctagctgtactacttggccaggcctccccggggcagcagctccacgtagctcagggcactctgcagtgatgtgaggcagtagccctcctctccgatcaggtacctgcatggatggcaggggcagccggtgtcatctraacgaacagaaggatacccccggccctccagaaggtagtgtctgccctcccagttcaggacctgggtgctgagggtgggcaggtggggctgtcagggcggctgggctagaggaggcctttcccacccactatgtgctcgtccttggacggtagagccagggatggcactggatccttatcccctccccaggcagatgctgctcaggggacagcccccagctcctgctgtctgggagaggctgagctaagcgaagggccacgggacatgtggcagcaggcactctgcacaggtggacccacaggggctgcccgaaggcatggctgtgacggagccacacgctaccctccccagctgctactgacaaccaccgtttaggttgagggatgaggtccctgctcttcgcacagagacccccaccctgacccgccagggtctacccctcgtggatgaactcctccagggccgcgcactccgacaccagctgagggaggccgctcctcagcaccacgaaggacaggatgggcagcaggtcatcggcaccactgtcgggagggcatagcggccttgggttggggccaggagcctctcactccgcaaacccagcagctgtggagccatcctggccgtgctggccgccatctctgtgcccttctgcgcagaggcaccggaaggcagctgggcatggtgaggctgtccctaaagggagctcccgtactgcggagccagggctgggcccacacggccctcctgcttctacagtgcagccagctggcacaaggctaaggggcaggaagatagtccctcccgtgaccattgcctttctagggcccttcctccctggccacacctcgccctcctgggactcacatggcagctgcagcgatgggcgggggcccggcctggggtgtggcctctggggtggggcagtagtcttccgcacagacacagatgatccgcagggtccgcactgcgccccagacagggtttcaggggcagttaaccccgtccagcagcctgagccaccccttataccccgcccacccacccacctcctgatgtgcacggctgggaagagccacggtgaccctggcgatgttgctcagacaccacttttgttctggtcccccaacctccccaccggcacgtgacaagagaagctcagtggtgaagacacaggctccaggtcacctactgggatgggagcctgtccctccccctgactctcgaacctgctgacctatgcactccagcttcttctgggggcagctctccaggaccagcagtccgagctcctgggccgccgcgcagtaggggtagccagtggcccccttggcctcagggttctgggggaggagcttggtggggatgccaatggcggtggggggtgcattcctgtagagctccatgctcctgctcagggcagcctcccgggctcggtgcacgctcctggggcagagagaggccaggctaagctgccccagggaccttgccctggggacagaagcagggctgtggctggagctcagtcctggagaaaactggctatgtatctcaagcaaaaagccccagcgttgccaagaccccaggcacgggagagtggcaataatcctacctgcaaactggaagcccctgaggatggcctcagggtaaagcacaggctagggggagcaaacacgagtcttggggatggaggggagcagacagtgccagggagcagggcaggcctcctgggggactgggctggaagacactaggccacgcaggtggttgtacagctgggtccatacctgtacagggccagcagcagaggccacagcggggagaaaaagggttcctcaatgcaggccaggcagcggtccttggaggcagctgtgtttaggccttcgaaggccagaagggtcagcgagagcagcctgtctgctaggaacagagccggggacgtccacagaggctcctcccctgctgggtcaagtggctctaagccacggggcctttctccgcccaagaaacctctttccaccgccttcaagcctcctgcacccacccctgaccctcctcggcccagggcagggagtccgggactggaaacggtcacctacagctgctgccctgttgggccagcagcctgagaagaaaccggagaatgatccttttctcaaaaggggctttacccaaaactgcaggaaccagggaagactttagatccaaccccctgtgggtggggaccctgaccaagttccttagtgtgtgggcagcacagtgagaatgacgcctggactgttgggcctccctcagtggttcttagaaaactctgggctgggcgcggtggctcatgcttgtaatcccagcactttgggaggccggggtgggcagatcaactgaggtcaggagtttgagaacagcttgaccaacatggtgaaactccgtttctaccacactgtttccaaaatgagaagggctgaggcgtgagctgggtggatgtaagtctgatcagagtctctgatcaacagacccttccccaaacagaagcttgaaacggaccaataagcaggggtgaagagctgcggcggctctcccagggagggcctggcctcacctacggcattgtggatctcctccaccgcggtcttcagctgctgcagctggggctccggctgtaccccacggccccggccctgccgctcagacgtccccaggaactgctccaggtcctcgaacgagctgtccttgtctggcaatccagatgcggtgtcccccaggggtgagggagaccccacggggccgggttggagtgggggcgtggggggactgtcctggggccgcggggctgcgctgggctcgggcggggacagcatgcaatggaggctctgcgagggccgcagccgtcggcttccggggttgggggtcggggggcagcagcctggggctggcgcggctgctctgctcacggcgggatacagggcgctgtacacggagcactgcagccgcctcaggagctgcgcgatcgggtggtcggggaggctgcgggagaagaggacgtgagaacgcggccagcctcggcctctccgtggcatccacaggtgccgcgctatgcccggtttcagagaagcgacttgcattacctcctgacagtgaatgttggaaagtctgccccccgcccccgctggggaggttggagaagccgaggaaacgccctcagcgcaaagggagctgcagtgtccacgtggccgggcacaggctccctgtgtcagtccagcccctctccggcacctggcaccaggcagaggtgcccaaggccggtgcgcaggggctctgtggggcctgaaggcccagctacctgagcaggtgtgagaccaggctggtcacgagtgacaggtcccccggattcctcttgagcttggccttccagtgcttcggccagtcctacgggacagggggccttgaaggaaagcacggtgggtccgccacgaccggacgcgcctcatctcccaccagtgccgacccctagagactgtgggagcccgtcctggggtgcaggagacccagcgccagcaggccccgcgacccgcccccgcccccacccacacccgagggaaaccttaggcgaaccctgggcctgcaccctcgctgggaccctccctcctcgcagggaccctccctcctcgctgggaccctcccacgcgacccctgacctcgcctcctcgctctgccccgccccacgcagccctggccccgccccctcaccgggccctcccacgggcctctggccccgccccctcactgccccccacagcctctggctccgccccccacgggggcccacccaggcggctctgaccccgcccccctcgctgggctcctcctacaaagcctgggcccgtgggggacgcacatggtcctgttcgtactccaggatggcggcgtaaagggcccgctgctcccgttcctccggggtcagggcgacttggctgcaaaacctcctggggagaaaggcacgcggtgggtgccggggccaggccctccccgcagcggccccaggggcgggcaggagtcccacctgttggcggcctcctggagccgcagccggcgctcctccatctttctctggagctgggtgcagagtcaaggggccgagcgtgggatctgagcgggccctcggttcccaaccccgtcccacacccggagaggccgggacgtcccagggacctcctctcggtgaggggctgtccccaggtaaggcttctggggcagaaggcagcctgcgctcaagccaggagggccgggccagagaacatgggggacggcggccgggccttcccctgagaccctgcctctgcaaagcggggagcccctcggccctgtaccccgaccccggaacctccgctcccctcgctgcccccttctctgcccttggctcaaggccacactgagtttcccctcggggaccaccagggcggtcagaaaggctgctgtctcctcccgggctttggcaatcactaggttctccatcatctgccgctgtagagagagggtctggggggggaggagggagtaaggccgactcccctctgccccgcgcccacgcacccccaggccctccctagcccccactcaccagggatgtcttctgcatggcctggctggggtctagccgcgccattcgggcctcatacgcagccttcagcttctgattctgcagggaggcctcctccagtggcgtcagctctctggaaatgtgacaagctgctgtctagaccccaggaagcccagtggtgtctggacaccagaggagtctctctcatcctcccggattgctctgaggccaggaggtgaggagaaagaggaggggagccatctggggtgggctgcaacatctgccccttcttgcctgcccttccaaaacacaggttttggccaggtgcagtggctcccgcctctaatgccagcactttaggaggctaaggccgggcggatcacctgaggtcaggagttcgagaccagcctggccaacatggtgaaactctgtctctactaaaaatacaaaaattagctgggcatggtgcacacttgtaatcccagctactcgggaggctgaggcagaatagcttgatcccgggaggtgatgcagtgagccgagatctggccactgcactccagctggggtgatagagtgagactctgtctcaaaaaaacaaaaccaaaacaaaaaataacaaaaagaaagaaaacacaggttttggtattgccaggacttttggtttttctttttttctttttttttttgagacggagtctcgctctgtcgcccaggctggagcgcagtggcgcaatctcggctcactgcaaactccgcctcccgggttcatgccattctcctgcctcagcctcctgagtagctgggactacaggtgcccgccactatgcccggctaattttttgtatttttagtagagacggggtttcaccgcattaaccaggatggtcttgatctcctgacctcgtgatccacccgcctcggcctcccaaagtactgggattacaggcgtgagctaccgcgcccggccggacttttggtttttcaagagaagctggaccactggacttctatggagatccgttatatgtgtttggcaacagtatgaatcttgttaaagcaagcttgtgcaacaatccgaggctgtatgacttcgaatgtggcccaacacaaattcctaaactttcttaaaacatcactgagggctgggcacggtggctcacgcctgtaatcccagcactttgggaggatgaggcaggcggataatgaggtcaggagattgagaccatcctggctaacatggtgaaaccccgtctctattaaaaatacaaaaaattagccgggtgtggtggcatgtgcctgtgctccagcctgggtgatagagactctgtctcaaaaaatcactgaggtttttttgcaaaatttttttttttgagtcagtctcattctgtcgcccaggctggagtgcagtgacacaatctcaactcactgcaacctccgcctcctgggttcaagtgattctcctgcctcagcctcccgagtagctgggattacaggcatgtgacaccacgcccagctaatttttgtattttttagtagagatggggtttcatcatgttggccaggctgatctcgaactcctgacctcaggtaatctgcccgccttggccttccaaagtgctgggattacaggcgggagccactgcgcccagccttgcaatttttttttttaagctcatcggctgttgttagtgttagcgtattttatgtgtggcccaagacaattcttccagtgtggcccagggaaggcaaaagattggacacccctgctttaaaggcactatgtgggtcaaacagccagattagtctgtgacccatgaaaggaagaagtgtcctgtctcctttatacagttcccaacagccactccaccttgaaagctttgttccctcgtaccttcccactgtcagggacaatggaggacaaggaggaaagtcagagcctgacgcctggccaccctgccctgaagccacattgcagaaacaaggggactgggaagccaggccccgccagagcaggggcaggaggagtggacccttctcgtctctcccacttgggagtcactgggctttttgcatttgtgtctttgtatctttcatcagttctagacaactgtctgccattctaacttctaataatgcctctctcccattttctttcttctttttttttgagccggagtctcgctctgttgctaggctggagtgcagtggcacgatcttggctcactgcaacctccacctcctgggttcaagcgattctcctgcctcagcctcccaagtagctggggttacaggcacgcgccaccatgcccagctaagttttgtatttttagtagagatggggtttcaccatgttagccaggctggtcttgaactcctgaccttgtgatctgcctgccttggcctccctcccattttctttctggaactccaacgaacacgttaggctttccatctcttgttttctgtctttattttttgtttctgtaattcattctagctatcttttgaccttttttccaatacatgaatttgctcttcagctatatctgctctgctgttataaacttgtctgctcagttttgtatgtatggatttctacatatatatagatatataactcatccttgttcccagctaaatttttttttttttttttttgagatggagtcttgctctgtcgcccaggctggaatgcagtggcgcaatctcaactcactgcaacctctgcctcctgggttcaagggattctcctgcctcagcctcctgagtagctgggactataggtgcccgccaccacgcccagctaattttttgtatttttagtagagatggggtttcaccttgttggccaggatggtctcgatctcctgacctcatgatccacccacctcggcctcccaaagtgctgggattacaggcgtgagccaccgcgcccggtcattttttttttttttagacagagtctcattttgttgcccaagctggagtgcactggcacaatcacggctcactgcaccctcaacctgtcaggctcaagtgagcctcccacctcagcctccctagtagttgggactacaggggcacaccactatgcctaattttttttgagacggagtttcactcttgttgcccaggctggagtgcagtggcacaatcttcgctcactgcaacctccaccttccaggatcaagcgattctcctggactcagcctcctgagtagctgggattacaggtgcacaccaccacggccagctaatttttgtatttttagtaaagacggggttttaccatgttggccaggctggtcaggaactcctgacctcaggtgatctgctcgcctcggcctcctacagtgctgggattacaggcgtgagccaccaggccgcctgcatttgcttgtgtccggccaggggatattcccattctgggactcattttaaaaacattcgctgtcaggccaggcgcagtggctcatgcctgtaatcccagcactgtgggggccgggcgcggtgactcacgctgtaatcccagcactgtgggaggccgaggcaggcgcatcacgaggtcaggagatcgaaaccatcctggctaacatggcaaaaccccgtctctactaaaaatacaaaaaattagctgggtgtggtggtgggcgcctgtagtctcagctacttgggaggctgaggcagaagaatggtgtgaacccgggaggtggaggttgccgtgagccaagattgagccgctgcactccagcctgggtgacagagtgagactctgtctcaaaaaacaaaaaaaaaatcgctgtcatcagctcatctttctcagcctcaaaaacccaatcccaggctcatcccacctcccatcttgtccatcttacttcttacagctttgtgactctgccccctgaagcttctggaagatctcgggtggcagaaaaggagagagctttcctccttcatcggagtatacacggcggtgtcggccggcaggctggggaatgggagcagctgcaggcatggttggcttcaggcgtgttttccctgcaagccatgggtaaccaggggtcaagcggtgggccacatcccacagaggagatgcgggcttgggggatgccccaggagagccgcctactgcaggagacccaccaagcttggcggccgtcgactgggccctctccagacactgctgtgctagcttcagcatcttggaggtgtcggggggcacagtttccccagcttctgggggagggacaagaaggctggtcacagtcggctctaccactgttacttactgctgagataaaatgaggcaacggaaaaggcaggcaagcccactgcccccctcagcacccccactgaccccgggcaagcccactgcccccccatcccctcactgaccctgggcaagcccactgcccccccatcccctcaccccgggtaagcccactgcccctcccgtcccccaactgactgaccctaggcaagcccactgcccccccatcccctcaccccgggtaagcccactgccccttccaccccccactgaccccgggcaagccgactattcctcatggaccccaggcaaggcccctgcccccaccatggaccccaggcaagtccccccacccacgcatttctaatcatctgccctggttttgcctcctgagtctgctaaggctgtgggcccctcatcgaggcccgtcacagcctcgaccctaaacaggcctttagtgctcactcagcttcacttgcaactgcaggcctctgggaagtggccgttttacagagacaaggacgtgctgaggggatcgcctcacccatctcccaccggctgtgtccccaaagtcctgccttcccgtagcttggcatggagcacctctgcgcgaccatggacctgctcacacagcccttctgcgcgccgtgggagctgcctctctgtgactcgcccctggacccaccgccccagcgcctgacccacctccctgctgcccttcacagaaaacttctcatagactcccattttctcatcccgccccgatttagcccccgactccccccggaaactgcccttacccgtccccaccttgccagacacggtgggccactggagttcctctgtcttctgggactttgctctccccaggggatcctctgccactcctccacccaactcctcaatcttggagcgccagagctcagccgagctcaccggctccctagggagctggggcaactgttagctccccctgacctgtgtgatcctacgtccagtggctgccccgacctctgtgatcccacgtccaggggctcccccgacctctgtgatcccacgtccagtggctcccccgacctctgtgctcccacgtccagtggctcccccgacctctgtgctcccacgtccagtggctcccccgacctctgtgctcccacgtccagtgggtccccctgacctctgtgatcccacgtccagtggctccccctgacctctgtgctctatgtccagtggctccccctgacctctgtgatcctttgtgcagcggctgctggcctctcaaacttaatgtgttcattgcggaacttgctattcctctccttgccagtttgctcctgccccatctgcctcctgcaagtctgctctgttccaccttcaggacgcaccccgaggccgtttactgctcccatcctgggtggtctggccactgccatcctcagtcctcacctgaggctccactcccaggctgtcctctccctcaaagctcaaagtctcttcaagtttccctgcacaccagaacggccccagttccacccaaggcatgcacacagccccaccccgcccactcctatttcagggcctttgcacaccccacagctggaatgctgccccacgtctgtgccgctcactggagccagtgtcttgccacaccccagtctccatcttcttatccacaacgctggtcccttcctgccactatatcacactgagtgtgggctggtccacctactacaaatggtcaggctagaaggatacaagagacccccgccgaagcctggcacccatcaagggctaggatgcccacaatttgtccagcatggaggaagcagcagggctcagccatgcctttttctttttcttttcttttttttttttttgagacggagtttcgctcttgttccaggctggagtacaatggggtgatctcggctcactgcaacctctgctcccgggttcaagcaattctcctgcctcagcctcccgagtagctgggactacagacacccgccaccaggcccagctgattttttagatttttagtagagacggggtttcaccatgttagccaggatggtttcgatctcctgacctcaggtgatagcccgcctctgcctcccacagtgctgggattacaggcgtgagccaccgcgcccggctggctgagccgtacctttagtggtttccacttcttctagtaacacctgggagatatagtggatgctcctcaggtattccgtgtatgcctcctgtgtccaggaaagagaaagagtggggtcaggccagtggagggaagtgactccattattccggccaggtgcccttgtgggataagcaaggaacaccaccacctgcttatctctgagatacacccagagacattgagcctgcggtggttagctgcagccggaacacggttttctgcgcagggcacaggcagcatcgctgctctccagacttggaaaagacatcaggacctgagagagagagagagccagggacgagctggacctcattttctcctctgactgcctttctctccagcacaggaactgatattctcattcagtgggcctggggaagtgacctcagcagtttgctgtcatttttcattctatgcaatgtttccttcttgtgcaactcaagggtgattcattcagtggcttaaaaaaatacttttctgagaggataaagggagtgatactggaagttttcaaatcacttcccggtttaagttccgagaaatccctttcccagaacctgcgagttacgtatttccagtgcacacaggagcctagaactgttacctttcaaggctgtgtgacccctctgacaaggcacaggtcattggaaccacagaatggtggtttgttttgttttgttgagacagagtctcactctgtcgcccaggctggagtgcagtggcaggatctcgagtcactgcaacctccgcctcctgggttcaagtgattctcatccctcagcctcccaaggagctaggattacaggtgtgcaccgccacacccagctaatttttgtatttttagtagagacggggtttcaccacgttggccaggctggtctcaaactcctcacctcaggtgatccaccgcctgggcctcccaaagtgtcaggattacaggcgtgaaccacagcgcccagcaatatgctatgtttttttgttttatccctagctgttaagtttcctatctttaagtctatgcctcagagagaaagacgaaatataatccaggcaggatttctgacttgcgggggcacctgctgccctaaaaaccaacttggggaaagcagcagattcaggaacgaggcttctcctaggcacaggcaggctccttccctccttgggcagccgggtgtggctgggccagcttctctacctggtcgccaaccttagattcggccccatctcaggaacgggccacacccctccggcctgcttttccttcctaagacgactgcaaacagcatcacaaatgagcaggtatgtggccttctctgcatgccgtcccctgtggcaaccggattaaatctaccatctctgcccagaaaaatgcacgaacgcacggacctgcycgtcactcggattttggaaggtggcctggcggaccctcctgctacatctcctctacaggtggagcccaggctgtgatgcaccggctcagcgagcggagtggaaagccaaggtccgcaggatctgagctgtccaaggtcactgcacgcccggctgcgccccgcccccgtcctcgcccgggaaccgcggcccgggatcccggctggcgcccgctcccaagtctccagcccgagccggccccgtcctcgccctccccgggcgggggtccctccaggggccaccctcagcggccaagccccgcccccgccccgcctcacccggggccggttgccggtgtccagctcgatggccccgttggcaagcttcatggcgctctgcagcggcttcaccgtgccgtccccggccgcagcggccatggcgccgagcgggggaggcggcggcggtagccgaggggctggacgggcgaccggaggcccggaacgcagccggcgctggtgctggagccgcccgagcagcggaccgcaggaagggacgcggccgcacttccggcgacgggccccctccgcgcgtactgcgggccccacgggtgttagtggcgggggcggcagagtccgggtgggttgtcgcgacggagccgggcctcttcgccgtcttgagacggggctggcgagaagggcccctcacggagttgccatgggcgtctaaccgcggcagccaggcccctctctacgtgagaccccggcccccctcccctttctgcagcccgcccgccacctgcgcgccgcgtggcctccgccggcgcctgcccgccccgcgcctccgtctcccacggtaagaggcggtgagggccgcgtcgcctctccctggaggactcgtcgtgaggtgtcggcgagcccctccgcccaccgccccgccccaggccagcgctccattggcgacagaggcgggcacggccgccctcgggcccgagaggggagcggtacgagcgggggcgctggcaccgcgggtggaacctcggccggcggggtcccgcccctggcccctggcccgccccgcccgcctcgctttgcttctcgctccgcccctcccccgccccgcctcgcttccagcgcgccgagcggagcctaacgccgggtcctctaggaacctcgggccgggcagcacccgcgggattctgctggcgtcctccgctgccatgaagcgggaccggctgggccgcttcctgtctcctgggtcgtcccgacagtgcggggcctcggacggcggcggcggcgtcagccggactcggggccgcccttcccttagcggtgggccgagggtggacggggcgacggcgcggcgcgcctggggcccggtggggtcctgcggggacgcgggcgaggacggcgcggacgaggcaggtgggtccgcggcccgggcgtggcgggttggggtcgcggcaggggttgctcgtgggaggagccgcactgacgcccggaagccggcgcggcctctcctccacccggccaagggcgtagcggactcggggctgcgtcgggataggcgctgggcggccggctcggttttcctcgcgctccgtgacgccggcgtcgccggcccggcctccccggccgcgggctcggccagaagggacccggcgtgaggagcgctgtcaccgcgggcaggtcgccctggggtgcccgcgcgtgggaatcgccctcccctgcttcgtgccctcgcggagccggaaaggaggcggcacctgcaattggcagacaggaaaccgcggcgtttcctggagggcgcagcgcctgccccgggtctcgcggtcgctgggaggagggtgcagttccaggtttcactcttgaagttgcttcgctggagaggccttagaggcctttgaaatttgaaagatttcttggaccagcggccacatcccccacagggcggcttgtcccgccgagagccgcgcgcccgagccgcttgctgtgtccgggagccgcgcgaagggcgctgcaggcgctgccctcggacctggagtccgggacgccctgtgctcaggagcctcctttgccagctgctaacacttcctgccgctctgtgcaggagcaggccgggctctcgccatgggtcactgtcgcctctgccacgggaagttttcctcgagaagcctgcgcagcatctccgagagggcgcctggagcgagcatggagaggccatccgcagaggagcgcgtgctcgtacgggacttccagcgcctgcttggtgtggctgtccgccaggaccccaccttgtctccgtttgtctgcaagagctgccacgcccagttctaccagtgccacagccttctcaagtccttcctgcagagggtcaacgcctccccggctggtcgccggaagccttgtgcaaagtacgccctagtctgttcagagcacgttcaggctgtcagtactgcagtgtgacgggtgttgagagagggacagggcgtgcctccgcgggagcctctgggtggggggaatgggccatgcccgggttcagtgccaacagccctgggactgttgtggagagatgaactgggaggagctggggtgagggaagagaaagttgcctatggggaccgctgaggtttgagatctcgagagggtcccgtacgacgagcgctgtgaacctccgcctgcttgtcctgctcatggccacactgatcctttgcagggtcggtgcccagcccccaacaggggcagaggagggagcgtgtctgggtgagtcctcccccggtggagggtgggctgggtgccgaccagccgtggatctgacatctctgttgactctctgcagtggatctgatcacatccagcccccagtgcctgcacggcttggtggggtgggtgcatggacatgcggccagctgcggggccctgccccaccttcagaggacactgtcctccgagtactgcggcgtcatccaggtcgtgtggggctgcgaccagggccacgactacaccatggataccagctccagctgcaaggccttcttgctggacagtgcgctggcagtcaagtggccatgggacaaagagacggcgccacggctgccccagcaccgagggtggaaccctggggatgcccctcagacctcccagggtagagggacagggaccccagttggggctgagaccaagaccctgcccagcacggatgtggcccagcctccttcggacagcgacgcggtggggcccaggtcgggcttcccacctcagccaagcctgcccctttgcagggccccaggtaggaggcacctcttgctggtgctagaccaggatgtgtgctcctcagtsgggcagggttttcagcagaaagtgaatgtctccactgctctaggtggtggctggggtgtggtgtgagaaggagcagagcttggggcttctgcctgcggctgctcaccacatccagagagcagggaggggcggccagcctgtctccgcctcttgctcctctgtgagcagggctctgttccagcagtttctgtggagacacgctcatcagccgtcgagtctttttctaagcctgtgcttggggctgaggggactgaggaagagggaagaatagggccttgtctgtggatgtgggagaaaagaatggccgttgcctctgcggctgctgccctgggccagctgcaggtcatttcctggcactcagccagccgcctggtgacaccctggtgtgggccagtgtggcgcagctttctctgctgacaggctgaggggaaacacaaggcccttgtttgggccccagaacccatagcactgtgggctggtgcagctgctcctggatgttgttttaggagggccagggccagtttccctccggcctcttgtcctgtgtgtgctctgtgcacctgtccccacctgagcactcagttcccactttgagtcttgaggggagcttccgaaaagcgtagctacctgtaatcccagcactttgggaggctgaggtgggtggatcacttgaggtcacgagatcaagaccaacctggccaacatagcgaaaccccatcgctaataaaaatacaaaaactagccaggtatggtggtgggcatctgtaatcccagctactctggaggctgaggcacgagaatcacttcagcctgggaggcggaagttgcagtgagccgacatcgcacaaccgtactccagcctgggtgacagagcaagactctgtcccaaacagaaacacagctacccagatagtttagctagatacgggtgcacagatgagacagtgcggctcgggggcctcaggtaggaacgggattgtgagtgtcacatcttagagctgcttggctctgtaaacttgtatgcagtgtgttgagaacaattctatctatctgtgtatctatctacctacctacctatctatcttcctacttctttgtctctctctatctacctacctatctgtatatctatgtatctacttatctacctatttatctatttatttacctacttatctatctatctatgtgtttatttatttttgagacagagtctcgttttgtagcccaggctggagtgcggtggtgccatcttggctcaccgctacctcagcctcccgagtagctgggatgacaggcacatgccaccacgcccacctaatttttgtatttttagtagagatggggtttcaccatgtgggccaggcttggtctcgaactcctgacctcgtgatccacctgcctcagcctcccgagtagctgggatgacgggcacgtgccaccacgcccacctaatttttgtatttttagtagagatggggtttcaccatgttggccaggcttggtctcgaactcctgacctcgtgatccacctgcctcagcctcccgagtagctgggatgatgggcacgcgccactacgcccacctaatttttgtatttttagtagagatggggtttcaccatgttggccaggcttggtcttgaactcctgacctcgtgatccacctgcatcagcctcccagaatgctgggattacaggtgtgaaccaccgcgcccagccaagaacaatactttttaaaacttattttaggccaagtgcagtggttcacgcctgtaatcccagcactctgggatgctgaggtaggcggatcacggggtcaggagatcgagaccatcctgactaacacggtgaaaccccatctctactaaaaatacaaaaaattagctggatgtggctgtggttgcctgtaggcccagctacttgggaggctgaggcaggagaatcgcttgaccctgggaggcggagattgcagtgagctgagattctaccactacgctctggcctgaccgacagagcaagattctgtctaaaaaagaaaaaaacaaaacaaagaaaacttattttaagtagagacagggtctcactcttttgcccaggctggtcttgaatttctgtcttcaagtgatccttctgccttggcctcccaaaaggctgagattataagcatgaaccttcaggcctggccgagagaacagtaatatttatttatttatttatggagtctcgctctgtcgccaccaggcctggccgagagaacagtattatttatttattgatggagtctcactctgtcgcccaggctcgagtgcagtggcacaatctcggctcactgcagcctctgcctcctgggttcaagtgattctcctgtctcagcctcccgagtagctgggattacaggcttgtgccaccacaccctgctaatttttttgtatttgtatttgtatttgttttgagaaggagtttcactctttgttacccaggctggagtgcagtggcacgatatcagctcaccacaacctctgcctcccaggttcaagcgattctcctgcctcagcctcccgagtagctgggattacaggcatgcaccactatgcctggctatttttgtattttttagtagaaatggggtttctccatgttggtaaggctggtctcgacctcccgacttcaggtgatccgcccaccccggcctccaaagtgctggaattgcaggcatgagttaccacgcccagctcaattttttgtattttttgtagagacggggtttaaccatgttagccaggttggtcttgatctcctgaccttgtgatccacccgcgtcagcctcccaaagtgctgggattacaggcgtgagccactgcacccggactgagaatagtaatttttaattattttatttttttgagtcggagtcttgctcttttgcccaggctggagtgcagtgcgcgatctcggctcactgcaatgtctgcctcccgggttcaagcgattcttctgcctcagcctcccaggtagctgggattacaggtgtgtgccaccatgcccggctaatttttgtatttttaatagagatggggtttcaccacgttggccaggctggtctcgatctcctgacctcgtgatccacctgcatcggcctcccaaagtgctgggattacagacatgagccaccgtgcctggcctagtaattttttaaatgtctcagaacatccaccaagtccaggctgtcctagaaggactggatcggagtcagtggaaggactgggctttctggttctgctgttcctgagggttctgatgcttgttgctgcctgtgtgcttctggacgttgggctggcagggcaggatcagaggctgcatagcacccttggtggggatggggccayggtggggagaacttgagggtcagggaccccagtctcccttctagtcatcaatagtagaatcatgcctccttgcaggtgagacctttctgtgctccgtgttggtaacaggagccttgttctttgtttctcagggcagttgggtgagaagcagcttccatcttcaacctcggatgatcgggtaaaagacgagttcagtgacctttctgaggggtgagagaagagtgggtttaaacagcctaaaatttctccttcaaaaaccatcagtgacctttctgaggggtgagagaagagtgggtttaaacagcctaaaatttctccttcaaaaaccaaacagccatcgtagggtcggctgcccatgcgctggtaccaaactaagccatcacaggggccggctgtccgtgccctggttgggacacgcctcctctcgaggtggcgggagaggaggggctggggagcttccgaggcttcttgtctctgattgatggtttcctgggtgccagagagcactcccagacctgaggcagctccagagggagcctgatagggtttctgacccagagcagcctagaaatgagtttgttgaaaccactctggctgggtcctttgcttctgctactgttttagggccatagttttgtgttcgctccagatgtttctggagtagagaaaccccgactttagcccttgactatgacactgttgtggcttgaagccgaggctctgcgaggaggtgttgcaggaggacgggcctcagaagggacctcatcagtgtctgcaaactccctgggccacccctgcctctgagccaagcgccattcagggcagctgtgccaggctggggtttgcaccgtttccaccctctcctgtaaaccttggctgcaacacagatgcacctcatccaaatgaggacaccccagtttgggggccaatcccagtgggatgtgcagtgatgaaatcgggcaggtgccaggaggcacctggggtggctaagactgtcctcaggaccaccaggacacaaaaccgcagctgaggttatagcataaaggccacaaatctttttttttttttttttttccttttgtgaacttttttttttagaccgagccttactctgttgcccaggctggagtgcagtggtgtgacctcagctcactgcaaactccacctcccgcgttcaagtgattctcccgcctcagcctcccgagtagctgggattacaggcgcccgccaccacacccagctaagttttgtatttatttattttttttttatttgagacggagtctcgctgtgttgcccaggctggagtgcagtggcacaatctcggctcactgcaagctctgcctcccgggttcacgccattctccggcctcagcctctgagtcgctgggactacaggcacccgccaccacgcccggctaattttttgtatttttagcagagacggggtttcactttgttagccgggatggtcttgatctcctgacctcgtgatccgcccgcctctgcctcccaaagtgctgggattacaggtgttagccaccgcacccggccaatttttgtatttttagtagagacggggtttcacggtattggccaggctggtcttgaactcctgacctcatgcgatccacctacgtcaccctcccaaagtgctgggattacaggagttagcctctgcacccagccacttttgtgaacttagaagtgactcatggcaaacccatcagttgcatagggttcgcagttatggggtgaggtggtcgatttctcaaagtctgcttagcaggaagctacctttgagcgcctccaccccttctgggccgctgtggaaagggctgtttccaagtccagtgtcctggtgcccagagcacatggcttgtggggattgctggcttgtgagcctggctggccctttgtgttcggaaacgggattggaaatttggggattttagatttaagacattttcagaagaactcaaatgtgggacatgggggtccatttggtatctttaggcaggaggtcgtgttgggtctgtcactgcccaggcccagggctttgctgaagattctctcttaattcctagagacgtcttgagtgaagatgaaaatgacaagaagcaaaatgcccagtcttcggacgagtcctttgagccttacccagaaaggaagtaagtgggcagcccggggtctgctggaggcatccgttgggcgacctagacacccgcctgtgctccagggcctctccccggtgcccactcagttcactctctcgtgtgcggatctcccgagcccagtgaaacgtggcttccctcagtgagcgggaggcgggggaggggcaggcgggcaggtgagaaggtgggtcctcctggtgctttggagctgggacctggtctcggcactgtgaggctgcctcagagtcccagcagtggatggcaggtgtctctgtcgacagaaccccgccttgcttgagaaggaggctcttacgtcccttctgccggtcctgccctgggttcacaccccagtgtacccccgaagcccccaacccgtcgcttctgctttgtgtgcgtccccagaggcccgaggacccagctctgtcatcctcccagttctgaccccatcactgatgtccatggccaggcagccacggtccacttccctgttgaatgacttctgtgagcttgttttgactttgtttttagggatttttattttctctcttcagttagaacacaggccctggtagtgagggctggttttcacttgtgctgttttctttgcagccctatacccagcagtacccagaacactcccaggtagttggtgactgacccagtccctgtccttgagcatttcacagcccagaacaaaggtccagagggcaggtggctctgagcaccaccgtcagccactagaaccctgctgtgcagactgagaggtcaacggccttttttcatggaagttctgatgctgttaagttctgaaaagagaaacgggagcagtggaggaggccyggagagagatgcgaagcagagggcaggactgagccagaggggctgcagcagcttcagcatgaacagaaaactggtcaggcccagaaaaggtgcccgggggtccctacccccaggcttgttcccaggagtcatggctgggagtgccgcctgaggctgctgtacggaagcccccactccgtgaccctcygggttgagtctgaatcccaggacacctgagaatgtgtctctggcttgctgcccagaaggtctggggctgctggtgtgaggagggctgggagctgggatgggaggagccaggcgagccttttccggatcgaggcagattcaggaggggagggtcctctctgctgagcccctgctgctgtgacagggacagcacactcagactgtgtcactagtccctctgggaccccaggagtgcagacaaagacgtgctttggaacagagacacgggagatacgttttcagaggtctctaataaaaggggtgacttcagtggaaaccgctgcgcaggaggcaggactgggtggtagcaagcatggcctcctgactgcggcgagtaccaggggcacttggttccccagctgccaccgtgagacccccctgggaacccagaagggcctctgcacagcccccggcccgtgtgctgcctcccagtcttgtcaaccctgaccttggagttctagcgggcgtgcccgcctgtgtcctcagctgggggcgcatgagaagagacttctgtgatgtgttaatgaggggtcagtggttcccgccagaggggaaggccagggcctgcacccccatggggaaagaactgacaggcagcagtgaggcctgagcccagcccacccggtccgcaaagattcccgtcccaaacacgagggcacagagactgcgggtgctctgaagcctcctgtgctgaggaggtgagtggtcattgtgggaaygscatggccagccactcacaaacaaggggccacccaatccaggcaggcagggcaggtgagggggacatgtggctaggtcatgaaaaccagttattagggacagggagagaaggygcagcctgtgcgaagtcaacagttcttctcagtgcgtttttgtcttgtttctgagatggagtcttgctctgttgcccagactggagtgcagtggcacgatcttggctcactgcaacctccgcctcccgagttcaagtgattctcctgcctcagcctcctgagtagctgggattacaggcatgtgccaccatacctggctaatttttgtatttttagtagagatgggatttctcccacgttggccacactggtctcgaactcctgacctcatgatccgcccgcctcagcctgccaaagtgctgggattacaggcgtgagscaccgcgscggcctcaatgcactctttaaagagaagggcagttagcgacagggtctcatgttgttgcctaggctggggtgccctggcacgatcatggctgactgcagccctgtgcgctcaagtgagcctctcacctcagcctcccagggtgstgggactgccaacatgagccactggactcggcagtgtaaactacttttttcatgctattgcatatgtattgttcattgataatatatagaaacataactgggttttgtgtatggattttgtgccctgcaactttgctgaaataattaattagggttttttgtatgtggatctttagggttttctacgtagaaggtcgtgtcatttgtgaatagggagaatttgtctttgttttctttttcttgcccagttactctggctagggcctccagtgctgccctgagagcagtggtgagagaatccgtatmttgttcctgaccttggaggaagagctttcagtccttcacagttgagcgtggtgtctgctgtgggtttcatgtagaggttttatcgtggtgaagaagttcctttctgttcttsagatatttccttaactattcttacctggatccagaaaggaaccacaagtgcgtctctctctttaagtctccgatagacgcacactggaagctgctgcatttgctggtccctcagggacttgccagaccaactaaaatgcacgaccccagacttttggaggacaaggtctcctgcccaccatggtcccagccagcagctccaggaacacaggctgggctccctgcagtggaggcggggttgaggaatgctggggtggcagctactcaccgtgtgcttcccagggagcatcacctgttcctctgaagccctgcctgggtggcttgagcttggaatcaagctgacccattttgagagagtggattctgagctttttcctagcgtaaggtcgttttgataaaggagtggtcctttggacatccctgttctgccgtcctgatacctctagttgtgggttttatgtgtagcacagggtgaagctttagttctcagaacccacccctgctgtaccctgtgccctcgccctccgctgtgtttgccctgaccctcctgtaccctgcgtcctcgccctctgctgtgctcacccgaccctgctgtaccctgcgccctcgtcctctgccgtttgcccctgaccctgctgtaccatgccctcgccctctgctgtgttcaccctgaccctgctgtaccctgcgccctcaccctctgctgtgttcacctgaccctgctgtgtcctgcgcccttgccctctgctgtgctcgccctgaccctgctgtaccccgctgtaccctgcgccctcgccctctgctgtgttcaccccgaccctgctgtaccctgcgccctcatcctctgctgtgccctccccctctgctgtgttcgccctgaccctgctgtaccctgcgccctcgccctctgctgtgtttgccctgaccctgctgtaccctgcgccctcgccctctgctgtgttcacccctgaccctgctgtgtcctgcgcccttgccctctgctgtgctcgcccctgaggcctcctgtccagagttgctctggctttggtggcttcaggtagattctgagggtcagtcagcacagaagcaactcagggaagcttcagaaaagaccatttctcaggttggagagacaaaaaacattttgcaaatggagatcagaaaccattgaatttgggaacctctttttttcagagtctctggtaagaagagtgaaagcaaagaagccaagaagtctgaagaaccaagaattcggaagaagccgggacccaagcccggatggaagaagaagcttcgttgtgagaggtgatgcctgcaacgcgaggctcgccctgcctgtcggggccggggctccatgcatgctcttcattgcagggaggagcttcccaccatctacaagtgtccttaccagggctgcacggccgtgtaccgaggcgctgacggcatgaaggtgagcactggctgtgcctgacccaggcccggcagctgtcagtgtgaacctgggggaggtagcaggtgtttctgcagcctaactcagacttgygcccaaggacactttgacctaggttaaccgagacctgaagcagtcctagccagtgccatccttgggggtagatgtgrggccagactttcacttgagacaccccccggggggtctagaagtttcttggagtgaagctgtgaaggagccagtggtgtcgctggaggaggagttggatctgccttccaggggcctcagctgtcacctactgagggctcgtgccatgtggcccgggtgcggctctgagggtctctcaccgagtctctccttcagaagcacatcaaggagcaccacgaggaggtccgggagcggccctgcccccaccctggctgcaacaaggttttcatgatcgaccgctacctgcagcgccacgtgaagctcatccacacaggtacgcctatcgccagtgtcgcccacgcgggtgacagccaggggcacgtgacctgctttccagtcttcctcatacccatccccgccccaagagttgggggtgcgtgaaggtggctcatggggtctttggtactcagtcacgttggtagatgaaggctagagtagggcgtcagtgtgaatctgcccttccctgtgatggaaggaattcctgacttccccaggatctaggcagtttgtcaaaactaatagccaagcaatcttggtgtccttttgcaaattggtcattttattttttaatttttttttgagacggagtcctgctctgttgcccaggctggagtgcagtggcaccatcttggctcaccacaacctctgcctcccaggttcaatcaattctcccgcctcagcctcccaagtagctgggattacaggcacccgcaaccatgcctggctaatttttgtaatttttggtagagacggggtttcaccatgttggccagggtgatctctaactcctgacctcaagtgatctcagccttccaaagtgcagagattacaggtgtgagcastgcacctggcccaaacaagtgtatcttaaaaggcaaggcagaaggcatgaaggcacaccagctctggggagctgcccacgtggacaggcgggaggcacgtgtggttctgcctyttcacrtgtgtgtaggtcgtgtcattaagaccggaggcggatgggggaattatgactgagggtgctgtctctgtgcccgtcttatttttcacaatttctataatgcacaagttacttttataatccaacaaggatatgttttcaaaatgacaaacttggccgggcgtggtggctcacacctgtaatcccagcactttgggaggctgaggtgggtggatcacctgaggtcagcagttcaagaccagcctggccaacatggtaaaacctggtctctactaaaaatacaaaaattatctgggtgtggtggcacacgcctgtaggcacagctacttgggaggcggaggtggaggttgcagtgagccgagatcacaccactgcactccagcctgggcaacagtgagacactgtctcaaaaaaaaaacttgtttgaaccacgtggacccacatatccatggtcagggactcgaatccctggtattcagagggctgccttttcctaagtgcaggttctgtagggtctttgcagggctaacttcgggacttcagtatgagcagattttggtaaggggtgggggggggcctggaaccagctgaggacaactgtatattgatccttacacacacagttttccttggttttgaacttattacagaataagaattatttattcttacttgaatttactgaagtattttttcattaggattgcttttcactgctgggtcatctcccgacatgcgggttgttattttttgggttctccgacatctctcctgatggcagcacttccttgggtttggtccttcagactctgcatctgtccggtcactgatggtcacaaccagcagttccttaaaaacctgaaattgggccgggtgcagtggctcatgcctgtaatcgcagcactttggaggctaaggcagtaggattgcttgaggccaggattttgacaccagcctggrcaacatagtgaggccgtctttaccaaaaactttttttttaatttattgatggaaacagtctcactcttatcaccatggctggagtgcagtggcgcgatcttggctcactgtaacctccacctccctagttcaagcaattctcctgtctcagcctcctgagtagctgggattacaggcatctgccaccacgccgggggtgtttttttttgtttgtttgtttgtttttttgactgagtcttgctcttgtcgcccaggctggggtgcagtggcacaatctcagctcactgcaagctcctcttcctggggtaaagccattctcctgcctcagcctcccaaatagctgggactacaggtgctggccaccacacccaactaatttttcgtattttcagtacagacggggtttcaccacgttagtgaggctggtctcaatctcctgaccttgtgatccacctgcctcggcctcccgaagtgctgggattataagcgtgagccatgacgcctgggtaatttttctatttttagtagagaggcaggttttgctatgttggccaggctggtctcgagttcctgacctcaggtgatttgcctgccttggcctcccaaagtgctgggattacaggcatgagccaccgtgcccagcccccaatttttttttttttttccgggacagtctgtgtcgcccagcctggagtgcagctgtgcaatctcagctcactgcaacctccacctcctgggttcatgcaattctgctgcctcagcctcccgagtagctgggactacaggtgtgtgccaccacacctggctaatttttgtatttttagtagagacagggttttaccatattgattgggctggggctggtcttgaactgactkcatgatccgcctgccttggccttccaaagtgctgggattgagcactttgtgtaagccactgcaccggccccccaaattttttaaattacctgggtgtggtggtgcacacctgtggtcccagctacttgagaggttgaggcaggaggatcacttaagcctgggagttccaggctatagtgagccatgattgtaccattgcacttcaacctgggcaacagagcaagaccctgtctccaaaaaaaaaaaaaaaaaaagaatcccttgaacctgggaggtggagtttccagtgagctgagattgggctgttgcactccagcstgggcaacagagcaagactcaagtctcaaaaaaaaagaacagcgtagagtaaaatgccaagatagggtttcccttcgaagagaaaagtctgtcttgtgaagcgtttcagggcttgacagatgtggaggcagcacagggtgagtgggtctgcatgtccacatgtggcatttgtggactagcaagtgagatctctttgttcaagggtgtgagaaagatttccagagccagtacagcaatgcatacccccagaccctgggtatggacccctctcatatggagatgaattctagagaacagccatagctgtgacaatcagtattctatacaaccttagtgatacggcttcctttaagaatttgtaggccaggcacggtggctcacacatgtaatcccagcactttgggagaccgaggcaggcagatcacaaggtcaggaattcaagaccagcctggccaatatggtgtaaaccctgtctctactaaaaatacaaaaatcagctgggcgtggtggggggcgcctgtaatcccagctacttggcaggctgaggcacaagaatcgcttgagcctgggaggcgcaggttgcagtgagctgagatcacgccaccgcactgcagcctgggtaacagagcgaaactccatctcaaaaaaaaaaaaagacaagaatctgtggttaaggaaatagctttctgaggtttctttaaaaaccatcctgaaatgcacacagctgatgaagccacgtgacagtgtataaagcagtttaaagatcttaataaacgaggccctcataggccccttgcttgggcccactgcatggtgaaccatgtgcagaaatgtcttcccagctgtgatggtttcacattgtcatcgtcgtccccccgggaggttggagcatcaggggcctggactcactggactctcccctctcagaggtgcggaactatatctgtgacgaatgtggacaaaccttcaagcagcggaagcaccttctcgtccaccaaatgcgacattcgggagccaagcctttgcagtaagtgtgagtcaggaccccctcccagggctgtggccctcgcaccttcttatctgcctctgtcccccaggtgtgaggtctgtgggttccagtgcaggcagcgggcatccctcaagtaccacatgaccaaacacaaggctgagactgagctggactttgcctgtgaccagtgtggccggcggtttgagaaggcccacaacctcaatgtacacatgtccatggtgcacccgctgacacagacccaggacaaggccctgcccctggaggcggaaccaccacctgggccaccgagcccctctgtgaccacagagggccaggcggtgaagcccgaacccacctgaggacggcagtgaggatgagcacctctagcagcctggactccgcagtggctgtgtcagcctcacccttcgtgtgcacccgcatgggagggtcggagggtgctgcccgcccttggtgctggaggcgggcttggtgtccggctcaagtagccttcctctgctctgggaccagtggtttattttcccgcaaacgctgagtgactyggggccggacagttcataaataattgattcctttccccactaaagcagtcgaggagatttgtaatccactttttagtgcaacaagagctccatgttatgcttgtaataaattatttacacgggagctgggctggtgtgcagtggcaggtcccgtcagaagagatgaggctcctgggacaggtcagcgtcaggggcagcctgctgtctgctctggagggcggcgctcacctctgggtcgcagtccccacgatcagccagcagctgtgagagaggagcaggtcctcagcccatgccgcccactaggcctcagaccacaggggaggggctctggcagaaatagtcgagttgtattgccagccaggcaggcacatggcccaggcagctgtcaattctcatgtcccccacrtggcccaaggtgggcatcttgacgttacctctgccacgtgtgagaagctctttttcgggcaccgaggtattaactgcagcagaaaaagacgagcttttgttatcagttccacggggttgccctagagagaaaacaggcaaactcacaggttagaagacatacagaaacagggctggtgtgtcccccatagtctgcatgctgtgccggaacattctttggcagaaggagcctccggctggggggagctcccctggaggtgggactggcccttgcacctgcctgacccttgagctccaggctcctgccagctggaggtgaaactgtgcttgtatccccagccacgaagagctggaccagcttcaagtacatgtccacagcaacatgcaggaaggcctcttccctgatggccgcgtcttcatggaagtaggagagaagactagaggtaaagacatagtgacaaatggctacagactgctggaaaggtagcaggtgatgccaagggatactgctcatctgtggagcagaggcacagacaacccttcccatctggcgggacccagaggtgctgagatgggggtctgggaaacactgcccagccctgaccagccctgtgggtggaggtacctgtaaaaagcgaaaggcagcagcctggtgtgctgatccggggccacacggaggaggagccgccccagcctgaggtctgcaacaccaagaartggctcaggcaactctggacatctctgcctattatcagtgctggggacacccctgggggtcgggacgtgtaccctgggaggcctggctgtggggatagtgtggggcgaacagcctgagctgaggatacccaggtacctgtcagcagctgggagaggatgggggggtcgacctcttgcaggagggtgggtgtggtgcagagagaggcagtccccatgataggcccattggtcctggggttgaccagtgagccagtaaattatcttattgctttaaacaagtttgtgcttaatctgtcccaactaaaatggagcttataaacttacttagcaaggaacctcaaggagggctcgttcttaaccatttgcaagatgcctctgaaaagagcggccctccgcatttgtgcctcagcagcgtgtttcttaccactctctgtcaactgaaagagtgccagccaggatatcttcctcttctctaaacactcgaggattgctgcacaaacgtggaaagcctttggcaggtctgtggtgctctgtaaaccgcaggagaccaaccctgagaatggccgacctggtgctcccatgggtaggagggtacagccctcagcacagaagagggcatttcctctttgcttattgtaagtcttaaaactggtgacagttttacctatagaaggtaatactgggcctctggacagaagaggctcaggtaggaggccagggacttcgagcacccacaccaaggctgctgcaccacgtcctcaaataagacattaaaagaaaggcccacaggccggatgcagtggctcatgcctgtaatcccaacactttgggaggccgaggtcggcggatcactgaggccagttcaagaccagcctggcaatatggtgaaaccccgtctctactaaaaatacaaaaattagccgggtgtgacagactcacgcctgtaatcccagctactcgggaggctgatgcaggagaattgcttgaacccaggaggctgaggttgcagtgagctgagatcacaccactgcactccagcctgggtgacagagtgagacccccatctcaaaaaaaaaaaaaaaaaacccacggcctgggagttctcactcacacttccgcaaacacaaggagctcctgagctagtctggaaaccctgacttggaagctggctgcctggtgcccctgcctggcccacagtgggagaggacaccttggctggtaaggtctgacttacatttgaggtcagatgtgacgacagcaggcccatcaaggagaagaagaaaaggaaaaccaatagctgtaaataaaaacgtgcacttattattacattaaaattacctgtgctgtcattctaaataaggctgacacattcctctttaattgaaattttttacatctaggccataaatcctttaagtggatcttagaaaactttccaatcacttctagagagacagcttaattgagaattaattactactggctgggtcatttcacacttgcctttaaacaaagctagaaacagtttgaaaaagtgacaagagccagaaagagaagactgctgcggtctccttggctgtgcgcagtcccaactcagcatcatctccctgcaaggcctcctgtcagaagtgtttgtaaaatccttgaagataagcccacaggctccagcctaaagtagggcctgactgggcagggtctctgtggacactcctcgctgcacactagggtcctaaggccctggagccactaaaatcccttctaacaaaactacacaagaaacctgaagacgtactcagaagaacccctgcagggtggttataatcaccaaaaccctgggcgctgctgtcgatccagctttgagctggtgtaagttgtgtgctgacatggcacctatgcgttgcggatctcgggctgggcacagagggctgctgcctccagctctcttgtgggatgcttgtttctgttcctgttctgcacacaccacccttggctccctgcacagagagctgtgtgggtgtcactggtcttgtgggggcagtcaggctttccagggtgcagcaaccaggtgggcagtgggtctgagtcgaacatggtccctggcctggaattcaagagcagcctctcccactcctttccctatgcctatggctgcagacggtcccatccttgctgcctcttgtccccagcaccccaggtctgagctgtctcactgcaagcttatctggggctgtccctcagcacatgaatcaaggctactgcagcatgaacacagaaggcaccacttgaaggctgacagcatttacgctgggctgtgatgaggataaaaataagctgaagaaacgcacttcaagcctgggcaacacagtgagacccccatctcttttaatttttactttaaacaaattttttttttttgagacaagtctcgctctgtcacccagactgcagggcagtggcgtgatcttggctcactgcagcctctgccccctgggttcaagtgatcctcctgcctcagcctcctgagtagctttacaggctatgggattgtaggtgcgcaccaccacacccgactaatttttgtgtttttagtagagacagggtttcaccatgttgcccaagctggtctcaaactcctgacaccaagtgatccgcctgcctcggcctccctaagtgttgggattacaggcatgagccaccatgcctggactacagacccccatctcagaaaaaattacaaaattagccgggcatggtggcacacacctgtagtctgagctactccagaggctgaggtaagaggatggcttgagcccagaagaggctgcagtgagctgactgcaccactgcactccagcctgggcgacagtgagaccctgtctcaactacatacaaccatttaaaaaactgaaattattatttttactagtaaacttgatagtcaaagtcttactccaagccagctgggcgtggtggctcacgcctgtaatcccagcactttgggaggccaaggcgggaggatcacggggtcaggagatcgagaccatcctggctaacacagtgaaaccccgtctctactaaaaatacaaaaaaaaaaaaaaaaaaaaaaagtcttgctccaagccacatatttgtctttagaaaaacagttcatcagacaagcccagagaaatagcactgattgaaaccaagcttgcgagaaaataaatcagtaaaagaatttcctatcttgcctcctctctctcgcagtccagcttctttagctgcttcctgatgttttcttccctgacttgttgaatcgcaaagtgcagtgcagcagctgagagccagtccgggttgggtgcyggggaggcagcctcaggggagaggaaactgggacagagagaacggggtcattgcagggccttacaaccatacaaccacgccatagaaaccaagtccttattcccacctgtcacctttggggcctgcctttccatcagaggacagagaagggtttcaggaccatcagaaactaggtctgcatcccccaggtccacgtgagagtgtgggcaggtgctggtgctgcccccacrgcatcctggcgttctgagagctgctgactgagcaggcagctggcctggtcctgtctaccttgccctgtgctcttgggccccagctgcctacattttggaagaagaggcctcattttcctcagttgcccatgcctggccctgtggatcaggcattccctcctacaacagagaacaaaggactgcctggctctggccccagtgtggtgtctgagttttctggctggttaaaaaattggtaggaaattaatgaaacaatgctgtggtttaagagactttaaataagctgggcatgacggttcacatctgcaatcatagcacttcaggaggatcgcttaagcccagcagtttgagatctgcctgggcaacacagtgagactcaatctcaaataaacaaaaacgaggcagggcgtggtggttcacgcctgtaatcccagcactttgggaggctgaggcaggcagatcacctgaggtcgggagttcgagaccagcctgaccaacgtggagaaaccctgtctctactaaaaatacaaaattagccaggcatggtggctcacgcctgtaatcccagctactcaggagactgaggcaggaggatcgcttgaacctgggaggcggaggtcatggtgagccgagatcgtgccatctcactctagggtgggtgacaagagtgaaactctgtctcaaacaaaacaaaacaaaaaacaaaacttcagacaatctgatctgtgtttgtagaattagaactggaggtgtgacctgctttctccttttttgagatggagtttctctctcattgcccatgctggactacaatggcatgatctcggctcactgcaacctccacctcctgggttcaagcaattctcctgcctcagcctcctgagtagctgggactacaggcgcacactatcacacccagctcatttctgtattttcagtagagattgtttcacatgttggccaggctggtctcaaactcctgacctcaggtgatccacctgccttggcctcccaaagtgctgggattacaggtgtgcgccaccgcgccggggccctcttctcttctttcagcagacggcgagcagccaaaccctgaggggacccggtgtggcatcagtgattcaaaactagtcacaaagtaaggtgttctccaaggaggcaggatgggtactagcagtgccctctgacgaccccttaagaacacggcacccacattcagcaggtggagtggctgtcagctctgtggtcctcagaagggtgtgtgagcctggattgcgccaggagcttgatggtttgcaaggacccgtgaatatctgactggggtcgacaggtcagggtaggctgagaatctgcatccctgaggtccccatgacactgaccctaccagcacgcggtgcactctaggagcccacattagatttaagaggaaggggagcaggtgcaaaggaatcactcgagctcctcactcagacgggagcctgggagaggccgttcctcactcagacgagacactggcagaggctgtttttttttttgttttttttctggacagagtcttgctctattggccgttggagtgatctcggctcactggaaactccacctcctgggttcaactgattctcctgcctcggcctccccagtagttgggattacaggcgcccaccaccacgagaactcggttcttttctccctgctcacacgagaggctgcccacaccgcttctctcaagcaagccagggtgtttaggagatgaccttgagcaggtcccgaagtgcatctgggcgggcacaccccatctcaccacccacacgtactcgctggcaaactgccggccttcttgtagcttctgcagttcccggggcagcgggctctggcagtgtctcctccaccggcagagcagcacaggctccaggctcggccaccacacctatggagagagcaccagcacacagatgagggtggctgagatggacacacctccgctgccccagccrtgacaagcccccagtgctcctacaggccactacaggcccacactcgccctgcgctctggaactccaaagccagtattttttacgtcaattaaggctcaaagcagttccatgaggcayttattacccacactcatggaagacgtggaatttggagaaggaagagcctggcctaacgcaacagtgaagggaccacactcccctgagctgggaacgaaacagtgaagggaccacagtcccctgagctgggaatgaaacagtgaagggaccacactcctctgagctgggaacaaaa

SEQ ID NO: 2 - DNA, 89500 bp, Homo sapiens
tgcatgtaattacatttgtgttcttatgatatatattggttttcatccagggttcctggtttataactcccacagcccttattacagtcttttgttacaatgttgggtgtgtgaggcytcaggggcaggcctcaggaaatagaatctctctcctgccctcctttcagctgccccaaggcagaactctaatcttctcccacctttctgatgtgagtcttaagaccctccccagggaaggtcccaccctgtactctgtgggaagaaatgttgacatcatgaagcttccataaaaacccaagaggattgggtttgaggagcttctggagagctgaacacatggaggttcctggagggtggcatgcccagggtgggcatggaagcttctcgccccttcccccataccttgccctgcacatctcttcatctgtgtccttgatagtaaacctgtaaacataaggtttccctgagttctgtgaattgtttcagcaaattaatcatacccacagaggagatcacaggaaccccaacttgaagccagtcggtcagaactttctaaggcccagacttgtgacaatacttgtgtgtattgggaggcagtcttggggactgagcccttgacctgtgggttctgacactagctccaagtagatagtgctggaattaaattggaggacacccagctggtatctgtaatttggtgtgtggggaaaacagccccctaacctctgacgtttggtcacagaaatctctgttgcttgttgtggtgtgagaattgtggaaaaacatgatttgaggagaggtttcttgaaataacattcccttccttttccagaaaaaaatcttctatacataaatgctcagttacagcatgcaaactactaataatttatttcattattttcatttattttgcttaaatcacagggactggctatgtctgttttagaggactgattttacagtgcatccaatattgtaaatctactgtggcaacatatgcttagccagaagaagtcgaaagagaagagagtagaatgttctattctggaaatagttttcatgtcacatataaaaatgatatactaaatgaattatgtataaattctaaatgagctttgaaacttttttacgttaatataaaatagtatagaatatcaaaatccatttcagaaatttactacggttcactgttatgtttttcatttcaagcaaaactcttctaaagtttccataatataaatatatttgaaagtgtcttatatrttagtatatacagagatgccttaacacaatctcttattttatctgtctagtatcttttctcctctttcaccactatctcaagaacatctactcccaaatgcatatggttctcttaagctggaaaccaccatactcaattttctttgtcacgatgtttgttccaggtaagtgcatctgacccacataggaaaaaccagagtgcttcactgaggatgttagacatattttctcctttgggtcaagagtgtaaaactaggcctcaaaggagccagcaacttcatcccttgccttatagaacaacctgagaaaaggccaactttcagagaaaagctgagaaaagatgtgagaactaaacaggcttgaggctggtctttcctgagactatgatatctacatgtgaatttcttagtatggccaccagtaaacattctttggttttgagtttgtttgtgtagttttccatctcttaccagtgaaaatactgccttatcttagagttaaagaaatatcacatttaaaaattgcaccctagagggccgggtgtggtggcttacgcctgtaatcccagccctttgggaggccgaggcgagcggatcacgacgtcaggagatcgagaccatcccggctaacacggtgaagccccgtctccactaaaaatacattaaaaaagaaaattagccgggcatggtggcgggctcctgtagtgccagctactcaggaggctgaggcaggagaatggcgtgaacccgggaggcggagcttgcagtgagctgagatcgcaccactgaactccagcctgggcgatagagcgagactcggtctcaaaaccaaccaaccaaacaaaaattgcaccctagatgtaatgaaaaatttaatgaatgttaaaattattcaatattgtttttaaattaattaaaaataatttaggcataagagaacataaagaatatatcataagaactcatgcaatggctggtcagcttaagaaatcaaacaaattcagatgaagccaatagggtaatcctttcccaattgcttctctctctcttacccctgaagtaatcattattaacttgattattataattaccttgttattttaattatatataattatatatgtatagttatatgtattacatgtatgtatatatagacacatacatacatgaatccggaagaaataggcaaattcttagcccttctcactgtattaaatgataaacctgatacagacatcatcatttctttcctgaataattgcaacaaatattcggaggtctttcttctttgaccctttttctcttcagaatattctcagaagagtaattaggatcatccttttaaaacttgagccagactgtttcattcctcacctcaaaaccctccaatactgtcccacaccatgttgtgagagttcttgcagtgttcaacaaggcttctattctctctctgacctcatcacctaccattctctccactgctcacttcacctgggtcatactcttcctgaaggtgctgggcacacttctgctggtcagccgggaacgttatttgtaggattcacacagctctctccctcattttcttcagtgattacccaaatgtcattttcttgtgaggcctttccggataatattatttccaagattttttttcttttttaattgcagatgcccagaattgaattgcccgtattcatcaattcacagcacacaaccacacaattaacatctgtctctgccagaacctgtatttgtttggtactttgtttagtttatatttttcccttttatcttcctaactttatcatcctcattaccctcccaaccaaaggcaaccagtcttgagtatttactgtatttcttttcaattcaacttctatgtatttgtttacatgaatgtttacaaaaaggtatatctgtgagaatgtctagtttggctttctatctatttattctgaactaaaataatatcatgctgtgaatctcattatttgtactcatttatttctcaaatctatatttttgaaatctattgattttattatatgtagatctagataatttttttctgacagttgcatggtattccattacctgcctataatatattttatgtatctgttcctctagttatggagaaataaatatattgcctccagctttttacaaccacaaaaaactggaaaacatttctttactaatgcctttgtaaatgtttacttaccaaataatttaagtttctttggtattattttatatttcattttttcctttagcatcacaaaacaattattctttattattccaggacagtggtcctcaacctttttggcagtagagactggttttgtggaagacaattattccatggattgggggctgtgggggatggtttcaggatgaaactgtttcatctcagatcatcaggcattagattctcataaggagcacacaacctagatccatcacatgcgcagttcacaataggatttgcattcctaagagaatctaatgccactgctgatctgacaggacgcagaactcaggaggtgatgctcgcttggctgccactcacctcctactgtgtggcctggtttctaacaggccacagaccaatacaggtctgtggtcctagggttggggacccctgtactagaagaaataaagctttcaaagttataagctaagaaattattctatatatttctatagcccactatcttcccatctcccaatcatttcagctcatagttttgcaaaagagatagaacttaaaaagatcattacaattacagggtgattggcgcaatgatggaggcactgacaggagcaagagaaaacttccttaacagagccagatggagagcgcccacagataggttcttgaaaaagtaagctgaggggtgggtctcaaaggatgaaaaggtgttttccaggatcaagcattttgggaatgggtgatcatattaagcaaagagaacagcaggagcaaacttaacaagagaaactgcagagcctgtgtggaagactcaacacaattttgatataaccagatgtaaattgggagaaaggacatgtcaggagataaactggagaagtagaaagaggggctggttgtggtaaaacctagctagagttatatggttcatgaggtccacagaaatattttatgctagagagtgacaaagtcagattagatagtggctgtaaaagagatgtgaagatgatgataattcatcttcaaaaacttctaaggtagattaggagatcagtgtggacactaggcatttcttttggtgaaatgtgatggaaacctaaagttaggcagtagttagaatgaaaaaaaggaaagagatttaagaaatcctgaagaggtaaaatctgcaaggatttggcaattgcctaaccgtggaaatgagacagtgattagaagaataatgtaactaaaaccaaacctgagatataaaatacaggaggagaagaaatttacaggttaagagccatagtattttcttctatcctctagcaaaacaaacaaacaaaactacaatctgatatatttttctataccaataaatttgcatatttagagttttaaatcttaaaagtttgtttaaatcgttaacaaattattcttaattagttaaacaattatgtttaaggaacataaaattgtatatttccatatctccatattatcatgtttgccattacaacaattcaacctagattgattctagatcgtattttgcaaaatgaataattagtgactcattaattaataaagacacaactttttgttttgatactttaagttctgaggtacatgtgcagagcatgcaggtttgttataggtatacacgtgccatggtggtttgctgcactcatcaacctgtcatctacattaggtatttctcctaatgctatccctcccctagctccccaccccccaacaggccctggtgtgtgatgttctccaccctgtgtacatgtgttctcattgttcatctcccacttatgagtgagaacatacggtgtttggttttctgtccttgtgttagtttgctgagaatcatggtttccagcttcatccatgtccctgcaaaggacatgaactcatccttttttatggctgtatagtattccatggtgtatatgtgccacgttttctttatccagtctatcactgataggcgtttgggttggttccaagtcttttctattgtgaacacacaataaacatacgtgtgcatgtgtctttataggagaatgatttataattctttgggtatatacccagtaatgggattgctgggtcaaatggtatttctagttctagatccttgaggaataaccacactgtcttccacaatggttgaactaatttacactcccaccaagactgtaaaagcattcctacttctccayatcctctccagcatctgttgtttcctgactttttaatgatagccattctaactggcatgagatggtatctcattgtggttttgatttacatttctctaatgaccagtgatgatgagtttttcttcatgtgtttattggctgcataaatatcttcttttgagaagaagacacaacttttaaaagcaggtttttaaataactcaataatttcatctcattctattgttttaacccatgccacaattatttatttccaggagcgttttagtagaatattttatttaaaatatatttaaatactttattaagaaaactatgaacaagaaaatgattaactttagttctacaaaagtttaaaatatcacatgacgtgctagacaaatctcaatctgagactgctaatccatgttcctaaagtcattggaaaatgacattctggaaatagatcatattcagagctctaaaacacccataaaccaatgagcaacagctcatattaattttactcagataaactcacggctgactatttaaaaaaaccctgtaaattggctgaggaataacacagcagtctcaacatcaaactaaattgcaaaatttgacctaaattttgacctagccaagtcatcattaattaaaaggaaatgaactcaaactatcagactatcaaaagtaataaacacttgaagaaaaagctgtcttgaaaataaattgttgagaaatagttcctgttcatttggcctcttgcagtaactgaagtcattataaactaccttttccaccaactaaaatagaagtcaaatagagcatgcctctggttagctaaacacagaaccatagaatgtgaaatggactcaggcacttcagcactaaaagatggcttcaaccaataagtgtatttatctgatttaatttaatcaatctgatttaaatttataatttatatatttatgatttaaatttaatatatatttaatatataattaataattatatataatatataatttatatataattaataatttatattagtatataaatttaatatatataattgatatagttatgatttaaacttaataatctgatttaaaaagcattaatgaatgaaataaatattttttaaaaaccaaaataataactcagttaactgccttactctagaagatgtagtattttgataaattacatttcttctggttcaagaaattccttaatgttctcagcgaactttgtgaaatgcatatagcaacatttaagtcttcccaaaatagaattgtaatttcttttgattaagcctgcttttcataccttatggtagcattctgaatttctgatctctttgtataataccatagatgcataaaataaaaagtattaaactaattctcctactattttcaggatatgcccaaaatgttttaattaaaaacgtcaaatccttcttctagacttgtctgccagagattttctgcctttactgagagtgctccacacacacactcacatactaatcagaatgtggaagagtcgaattgaatcaattctttaagtaacataaaattgtgtatttccataacacgtctccatgttatcatgtttgccgttgtaacaattcaacctagactgatactagataatatttctgcaaaataaatagtgactcattaattaataaagacaaattttaaaagcaggttttaaaataactcaatcattctatctcattctgttcttttaatctgtatcacaattattttcaggaggattttagtggaatattttatttaaaatatatctaaatactttattaagaaaactatgaaaaaaaatgattagttatataaaagtttaaaatatataatgaaatgctagacaaatctcaatctgagactgttaatccatgttcctaaagtcacaatcctaaagtcacaagaaaaccacattctgaaaatacataatattcagagctctaaaacacccataaatcaatgagcaacagctcatattaattttactcagataagcttgcttgtaactgtaaaaaatagttgaatcaattagattgattcaattagattcttaaatcgaagaagcatcaattagaataacctaattgaattagagtcttccatatttgaaacaacaggtcaatgtcattatctatataaagctaagaaagcaaaatgtggccaggcacagtggctcatgcctctaatcccagcattttgggagactgaggcgggtggatcacctgaggtcaggagtttgagaccagcctggccaacatggtgaaaccccatctctactaaaaatacaaaagttaactgggcgtggtggcaggcacctgtaatccagctactcgggaggctgaggcaggagaatcacttgaagctggaaggtggaggttgcagtgagtcgagatcgcaccactgcgctccagcctgggcaataaagtgagattctgtctcaaaaaaagagagcaaaatgcaaacattctacctaattcaaactccaaattactcttttaactcatctttaaagtactatattgtcttataaagcatagtcaatttatttcttcaaaatcccgtgaaggtttgcttttcatcatgttcgaacagtttccctaacttttaaaatcagtttttacattgccctctgctgttaacatttcttttctgtttaatctttctaaatcatacttgtgtttagtgatcattttacatgatgaccattatcacatcatttcatctttatgatgctggtgcccgaagctgttttatttgcattttgattctgaatcatttttagaacaaagaacctcatttgtcttcctagatcactctcagagctgtctgtcctgcttttcgcacctctgcccctgcttgcattccagtccttatctattgaattgcctccaaacgagtcccccaacttcagataagatcctctctaacccatccttcagaaccccaaatctgtgtaattttccttcttaaaatcaatctatatcttccaattgcctatttacagtgtggagtctaagttcttcctgacagcttcagatatttcayaatttatctgaactgtgactgctctcaaatcctatcttgcactactccctccagcgcagaactatgctacagtcaggcaacttgtccacaagttcaccaatatcacgtattttctcatgttgcaaaggctttgacaatgatgtttccccatattggaatccttgccagcattccttctactatgaatacatattacttttatttcaagaactatttaaaaaaatattcctgccaggaaggcttttcttatccttcctacagcagagtaccttaatattcaatatacattcacatctgtcagaactctatgccaattgttcatgaacatgtttgtctgtcctactacactggttctttttggcagagacactgcattaataatcttctgtagatccagctgcgcttgtgaaaagagaagcacagtcaatataaattcagagttactatacttttaagtaaattatgtagtttttaattgaagtaataatctctctgagttcagttttagggtggtaaactccttaaaacctgtataacaacatacaggattaacaagacttttcaaggtgtcttaggtatggcaggcatatgcaaaaatctaatgttttaacacactctctcaatgtttttgtgtaaacatttatttcagtttcgcaattatgttattaaggttggtttagcctttggtttctctgagtttttattacttgattcaaacatatttatcaagtgggcactttgtgcaagtccctgtgccagacactgggaatagcataaatacggtaataccttattataaaggattcctgtgagaattgggttcaccagattttttaaaggacctagccaaatgcttggcaaataaatgaaagttgtgttgttgttattgttattaaggggtttgtgtagatttttttaaaaaagatgaatcatcaattagaatgaatataaataatcattcaatatgacaatatcataataatatgtgtaagataaagccctgctactgctacttagcattccataacaccaacaatagttgtctgggctccagagtgcaatgtaaattagagaaatcacaatggtgtgctatttcttggataagtgagcatccactttggatgataacagcctaaaattgcatctgcttagtgcaggacaaaacatgacttgagtagatagcaagtcctttttcaaagtaaaagatttaaacagaataatccacctccacagtttttagtggtacaaagcaaataatagaatatattgatgattttagagattagcagtcaacatttaataaacaagctgtgttgtgctttcctcagagtctattatctcgtgtccatagtactttcttatctgtaaaactggttccttaagggaaagtaatacttggttgaccaagggcttcttttctgaaatgtgctggtcttttctttttccagttttacttttttacttacctataaaatattttcttatacagaaaattatgtaaacttccaggattttctagatataataaattttaaaaaattttcattaaagtaataaactaaaaggtgggaaagtgaattatcttcaataaattttgtcatttttaaaaattctgaattttttcttcctgaacatttataaatttatttttaaactttcagtgaactggaaaaagaagttaaaagttaaaaactttgaatttcatagactttttttcctccagagattttgtattttacatcatcaaagtcaggttttttaaaagtgaaaaaaactttctctattcaacaatgaagctatcaggaggtctttaatgagtgtgtcagataaaaagagtacttaattgtaatacctactactgaagagttttaagagaatggatattcataataatttaggggaatggtagaaaattatttacttcaaataataccatttttttcttcttattattatgcagtttgattcctattgcttgtttttcatttcttcatataacaaaaggttgaataattttatggctcttttttttttttgacaaggtctcactctgtcatccaggctggggtgcagtggcatgatctcagctcactgtaacctctgcctcctgagcccaagcgatactccctcctcagcatcccaagtagctgggaccacaggcatggcgccaccacacccagctaattttcgtattttttttagagatggggttttgtcatgttgcctaggcttctcttgaactcttggactcaagcaatctgcccactccagcctcccaaagtgctgggattacagggtgagccacctcaccccaccaccattttatatttttgacttcttttttaaaaaaataaaatctcacatctcacatatctcaacccgttattttaccgaactcatagtcaaattgctaagagaaacccactgccaattattttttttaaatctgtttcctgggttctttacattcatatttcttaaaataattttgtattgcctttataatatatgggctttttaaattttggtatatgaagatttagcttttctcatccttgtcatatattacgatcttggttaaactaacatttggaatttatattaacttgcctctttaatattcatttttgagaaaatttggttcttatatggcaagctttacttaattttctttttttccttaagttattaattgctttttttttttacaattcgctcagctttctgcgtacctatctctaactgttctcaacacttccaagagcacctctttcaatactatttttcacttggccagacacatcatgaattttgtcaatgctcttctctcctgcatgagcaccccattcactgcccacgtgcagcctagaactctccatatatttttgtttttgaaattcgtgttatggtggagatgtcaaagacaaggaagagtcacattctatgccagtgctatccctggctttgaccttcccacctggggtttttaagggtagtacctatgtgtgtggccgacgctcaggtgaagatgcaaagcagtatcagctctggttttgagtcccagccaagttgatggacactctgccgcagttgcacccatatgttgagaaaacaaaactacaggctggctcttctgctagtgcttggtcacagtgtataccagttcacctccctggagacaaacgccattcgaaattgggttttcagggccctggaagtattgaattaatctctaaacttctctagtttctgtggagggccaattttttttattgggctactagaaatgtctgtaccccaaaatacatgggaatcaaattcagatttttaataactgctaatgaactcttcatatttgatatttgatctccacatttgatatttgatttccatatctctatatttgataagattttctcaggtgttctttatgcctgctgcatggctattgtctttagattctccttatctcatcatggaagtcctctattctttgtgtctctggattcacaaagtattgtgtgtggggtcagggtatgcttctatgtggttaattcgctattttggtggagcatatcttcaaggagcttcctgagataggtagcatggaaagtaaaatgtttgtacttagccttctcaaaaatcatttccttttacccttacacttgatggatagtttgtgttagatttttagtttacaatcccttccatttaaaatttcaaaggcattaattattatccttttctttttaagcctctattattgctgttgagatatcgtttgaattcttatcttttcttctttgtagttaacgtacattaattaattatctggagaaacctttagcatcttctctacgttttctgttttctgaattattatgatgtctcacgctgcaagtttatttatttcttgtctttctaatgtggagatttgttttctttagtttaaagaaatgtgttgtattttgaataacgtttcttttcatctctcccttttctgtggaattactgctagttagaatttgagcctgataggttaatcacttaattgttttttaataattataagtttttttgttgttattgctaatttctcttcagtgaaaagccattgttactgacatgctagttcataaattttttttcttttttttttttttttttttttttttttttgagacacagtcttgctttgtcatccaggctagagtgcagtggcacgacctcggctcactgcaccctctgcctcctgggctcaagcgatgccccctatcttagcctccctagcagctggaaccacaggcatgcgctaccatgcccagctaatttttgtattttttgtagagacggggtttatgccatgttgcccaggttggccttgaactcctgagttgaagcaatctgttctcctcggtctcccaaagtgctaggactagagacatgagccactgcgcctggctctccagtttataatttttgaccttgtttgttcttgtttgtccttttttgagcaaaacatgggagatccttatttagtatagtgatcatttagtgatcatacaagttacaatattttaatcttatttatcatttgctcattgcttttatttttggtttattttactatatgtgttattattatttatagacaaaaatgtttattatttctttgaagccttatggcttcttatcttgcttaggaaattgcccctcatattccactaagcctgtacaaatcttacttggatttccttcaaacatttttattattccatttttaaatttaatctccttaattaacctgaaaattatttggtatatggtaatgactagaagtctaattttcttttcttactgaagaaaattatggcagaactatttgataaaccaactttttctatggaatgaaatatctgttccattggaatttataataatcatttactttaaaaccatatatggactggttaagttatccatttgcccatttatctatttgtctattttgtgtaatttaatgttgttttgaatacagaaatttttaatatctgataaaacaagatttttaattttggcaagctacatagcacctgtaatgtaaatggtgttattagttgattgcctatcatcattaagtattggatgttttcctgcccaaaccaattaagatagtcttatgaatttaaaatgttttttcatgaaatagctctgtaaccttcaatatcaaaataaaaatgttggtaagtacaatggtaagagtcaggtgatgttagattagctatctgtagattctaactctttttaataagttgactataaaactctgctttgaatggttttactgctctagttctctgttttcttgactatataaggtggaaattattatttcaattattccatatctatatctcctactgtcttgtgacaaatgaaccagacaatgtgaaggcatttagaacaaaataaacattatatatttgtgatatttacacatcttttgttaattttctacatctatactaagaaaatattcttggcttatattcgttgtgttatttgctaagttttagtattcttatcttgattcaaaagcctctctctcataagtaaatcagagcaacaactcccagtgcaacatttcagagacttctaggtaaagaagacatttcaaaaaatattgaaaactactatttcagatattaatctctgaaagtctaaaatattctgggctttcatcaagcaattgacaatgctttgatgtgtgctaagacgaagaaatacccaagatcgcttccagaaatttaattcatttaactttttagtggtcaatcgataccctccagagatgaatctggcttagatttaagacacagatttttaaaaaatatttcaataatagggtattttgcagtaaatgccattaattttaaattcccagtgaataatccaggactagaaataagtgacactggattttagattcacgtaatttaggaaaatgtgataaggtgataaggtccagggaaatcacaccccaaataggaggaggctttccccttgcaccctttgctctagcttcactgaataacttctcttctatatacccccaatcttttcttccatctgtgatgttcctcatggtgttcttcagtctgaacttggcctcattcattgccacatgtctagaccttgttcaactttcaaagcagtcactacttgtaacctctttcacaaaaccatgctccccaccatcacttctacagatgctgccatgcttttcaatgctgaaattccaaagcatataattttccctctggcttatatatttttattgtaattagtcattgcatcatggttattaaagccccttctcaggatgattgttaaaatatacaataggtgtggtacagtcaccaaccaatctgaatggatcctggctgtacacacctggttcagcaagcatgcttactggctgctgatgaaatagaaccagccatactagatggacagtatgctccctcagatcagtatatgtactgaattgatctctgtaggatccaaagttttaatatagtgttttgcatataatagatacactcatatatagcactaatcaactttggaaatataagaaaggtagcctaagtattgggaaaaataagacagcaaggtcacatatttgtggagtgaattattggatgctataataatagctgttattatactctaattgaggatcttccataatggtttcatattttctctttgagagtagagcctagcaaatttctagaatgtttgagatttatttgttctggaaactgaatttccattcttactgaaactaaattggattttataaagatacttaagaaaataaatgatttattaggggtatttgttcttcaaaggtatacagccaagaaaattaagcttcatggaaagttgtgattgtaatactttttaaagatgataaacacctggtttaggagacttaatggatcaaggcagctactacatggatgctcactggcaaaaaataactattaaatacatccatcttaactaatggaagggtcagctagcttaaaggatgtaattagatgtttttagtgtaaattgggaaaacactcatctgtacaatttgaaagtctaattggtttgatttaaatgttaaagaaaagtggtcgtgtatagctctcattgtcaacaagtgcacaatattttatcaatcctgaataatgatcatttctttggatgggatcaaaatgactctcacatatacttctaatttaataatagctacaacttaaaggatgttaactgtatgccaaatacaacacttatttttgctttacatatgcacttaattaaattgtggaaattcaatgattgattagtggagatagtctgaaaaagtattactgttttatactacaacttaggttgaatcccagaacccttcatagggctcacattctgacccattgaactaatctcatgctgggattaaaattcataaacaacttctgtgaataaggtaaaacattattagagaaaatgactaagtggaaaattattgtttttaaattagaagcagaataaatggacttgcttaataagaataacaagaacatggctatttaacattaaaaatactcaatgacattctcaacagaaattgtaactccctaaaacattactttttacattctgaaccccataaagcaaaaacaagaataaaaattgtatgtgaacaaaccgtctaaaagtgattacttaaaatctatgatatactctggattaaagtatgctgtcctaaagcaaatctttgtagatgagtatttcttagagtggactaaggtattcataaaacaaagtgcttaaatgaataatataagtaatcgagatgaagtggaacatttcaaggatctataatttcaagaaaactgtgcttatctacagagtcacagtttttctgatgtcctggtgaaggattgaatggaggaaaaatacaataaaagaactatatattttgtctaaaaaaaattgaattgactcgtttgtttttgttcccccgctaaattggctgtttatgttcactgacaacaaaggcaaataaagataattatttggatcactcaaaacaaacaaaacactgattaaacatatatctcaagtacaacacaaagttgattccatatttctacgtggacaaaacaaaatcttgcactttgcattgatgtgtcctcctatctgcatagagcaaatacattcttaatcattttctcctcactctgtttatatattctttctaatttaaaattgcctctgaaagtctaatattattgcagttttcttctccatattattaactttttaaaatattttgcttatagtgattcatgcccaattcatatagataygtagattataaatttgattattgtcaaatgttaatagcaactcagtgaaaaacaacttgtccaaaatgttgctaccaaaagggcacttgactataaataactcacattatattacatattctgtcttgttcccatcytcaacccccgcccctctgctcaataactaatctaagatcaactgttgatcagggtcagttcgctaaaggggaaacatattgactcataagtttaaataaaaataaagtcgcctctgattggctccttcttggaaagcaagcaagttttgtgtgggactgatatgaaagaagaaagcagtattaggatgaataatttctgttcattgacagctgttaacatttatactaaaacaattttatttataaactttaggattaaagaaaggtaaaattaagtagctaaaactatgcatgaattgcttcactatatatctaaattctagactaatacgaaaatcaatagctgctaattgtatagatgatcatatttgttattcatttgctcaacaaacattctctaagcaactctgtgggcaaggctgtctgctaagtgctgggataccaagaggaataagcgctatctctggtttgagagttgttcagccttatggaggagacaaaaatagaaataggtaatttaaatcaaagaacaatgataaaatatgcaaattctgtcaactgtgttttaagagcatagtaggaaaaggaggcaaaattggggagagggtgaattaagtgcagggcatacgtagcttgatgcatccatgtaaaatattgtgctggccctatacttatatgctctcagatgcattcttcggtctcttccttcctttcttctcagagtagctgccctgtacagttttccagacctctccgtcaactggcttccagttggttttgatcaggcactggcagagattggagaatgggaggaagagagaaccaggatatttctccccatccttgtctgtctcaggatatatttctggcattggctgaatttctttcatgtttcttgctcccagaaagcaggcttgtcctggtttcggctctcgctgtcctctagcttatggggacaatagctatttttctgctgcttcactatcccccacttagtttctcagcttctttcacgagtatatcatcaattgctagtcatttgtttcctctatttcaaatattcagagccatttctagtttcctggttggacacaaatgcctgacatactgagtctaaattccaggagtttgggcagcaggtttgggactaatcaacatataagagagagttcatgagtgtacacagagatacggtaggtaaaaagattggtagattgagggtggaaccctgaagtatatagcaagagataaaggaaacatagcttttgaaggcgtccaaagattaatttacaatttcgaatagaacaagaaaaatgtggcattcacttaagcccctgagaaaacctaggtatcacttagacccagcatttgtcagatgaggtttctgaagrtagagaaattaggtcacatatctaataaagaccagaattgaaacctaaacctgtttccctatgtagtgctcttgtgataacacacccattatcatggtaatagtgtgacatttggtgtcattttcacttgttctgtccttgttccatgtgtgcacttcagtttccttttatataaagccaatatatgttattagttacctcataggtaattgtaagaattaaatgagacagtgcatgaaaagtacttagaataaactacttagaatagttaaatgtatagagagaggttggaatgacacatgaaggactatagggctactakattttatttattttattttttgagatggagtctccctctgtcgcccaggctggagtgcagtggcgagatctgggcttactgcaaactctgcctcctggattcaagcaattctcctgcctcagcctcctgagtagctgggattacaggtgcgtgccaccacgactgtctaatttttgtatttttagtagagatggggtttcgccatgttggtctcgaactcctgacctcgtgatctgcccacctcggcctcccaaagtgctgggatttcaggcgtgagccaccgtgcccagccagggatactagattttatcacagtattatgaaaggtaagcttgtcatcgtaaagcttatagatactccttttatatgtttgctgacgtcaaggatttttcacatttggtaataatttattatttgtttaataaaacgaaatttgaacttaaatttggtttgtctttagaagttagtttagcaattaatttttctgtaaaatgatttttacaccattaatttcttctcagcttcgtatatttaagaatttctatggacttaaatgaggttccatgattgattttctatttgcatgatattttaaacaaaatatatgttatatttttaagttcaagatttccctcccaccctgggaaagtcttctgagtctttttcatgtcatccttctcatttttctttctcttttaatttttcagtaccccaagttactttaatgttaaacacaaatgagaaaattggggaattgtaaaatgaatacagtcattctcatttaatagataatgatatcttactacctattgcttttgccattagtttgtaacatttaaattcatgttaaaagaaaaacaactgaaacacttatactgtagaatgcagattcagccaaaatccaatattgtaaatttttacttaccttcagtgtctgctagtcctactcctacccctggctgttttacaggctcttgtccattctgtcccatcttccctctgtttagaaataaaataaaatgatatattcagttatgatctcatgaatgcaaaagaggctaaatttgcataaataaaatgacattgatagtaatggcaaaacctgcaattacttttgcacaaccgaatatttttggacttgcaataattatttgaatggcacatacatacacagttaattgctctatatcataattttaaaatgtgaacttgtttattattcctattcaggccaaacaatatacctcaacattcagtagtttttatttgtagactatttatcaaaaaataagaccatcatgacatttagaaattttgttttagaattttttatttatttctaactcaacaatgagaaggggctttatatttttatatgttgtactgatgagttattccagtttttttggtaaaaagagcaatattgaattaaataatatataaaaatgatattttaataaaatatttcttatttcatgtatttttttttcaactcctttctgtgttttccactgtgttgagcaaactggcttttgtagtcaggctgcttggtctctgtttctggctttgctatttcttgctatgggtaatgtaaggcaaagtacctggtcaagactgtttctccttttgtgatataaagataataatattagctacattttgattatgaaaaaaaacacatgaaaaatgcgtgaaaagggttaacagagtgcctgagaaataataagcattcaataaacatgrcatattaacaggtaggcatgstcgtagtagccttagaattcaaccaaaatctgctaatcacttttagttttcagcttcaaactttttggaaagtcaactagatgaagaattcaggatactttgaggactgtaagcttagaatgttaataatttaacagctaaasgacagtagaccacttcttatttcttcggctagagaaaaagctacatggcacatgaagaagtttggaatttgcctttatatrtgcttagataaggcgttctaaaaagatggaataaaaaattgttacagaaagatgcttgaacaaaagagcatcttgatactgcactttgtagacaacacttctagcatagtgggatttactaacaattaattataactttcataggaagtatttggtttgctagacctgctgaaaatgtaaccatatttatttcttaataatccaattatatcttacttgaaaactgctctaaaggtcctcttattctacttcagagaaggtgctgaaatgtttccgcacataataaaagaacacatgtaaattcagaaattattttatctcaaaagccattacattgttccattataataattctaggttaaaggtttaagtacaaatttttattaagtgtgtatgtgagggaccaagttcatgcaaattaagcaatttccaacatttccattttaccatatatatgttaaaccatggtctgcatggtcaacatctgcatacatatttaagtaacacacaaaattttagcttatgtaattgcttcatcaagattcaagacaagtagttaagaaaaaaaaaagaactctgctctatctgttagcattagaggggaaaaaaagcttaatagcagtaatcttacttttatcagtacgctacactggtagagtgaaccaaaacataccttgttgctgagccaaactctattgaaagtgcaggtctttttagtattggtaatctagtagatcagaatactaaaaaataaatattcttatactatcccagacttttaaaaagtagttactgtaagtcttagtaattgtagtacaagtacattttgataatttttggggttgttcttgagtcttagactttatatgttaatggtgatacccagccagtctttgctttcaattgaaactgattttaacataggtacttagccaatatgtgtagtaagtacattttgaagattatacaaaaaactttcataggattgtgaagctaaattaagtgcaaaggaaatgtaactgtgagtcgtgtgaaggatgtggtttctctgaattcccaatgactacactttagctcagaacattctggctatacattttataatttatatttttaaataatcgctagatatttattaaacacttttactagcccaagctataattttattagatacaatgggggatataaaagaactgccaaatactacttcttacacatatcctataatggttttcaaaagtaaatattcgttgtgctcatatggcaaagcaagagtctcctagacagttgtgagaagctttgatttacaagagaaacaggaaaatgggaaaaatcaaaattagaatgtggtatatatataaaatacataatctacttatactgcagacattcaaatattgacaaaatgacatatttactttttggaattataactttaccatcagtgttaaattatatattttgaaaggtgcagaaaaattggaaggataacaaattatgtgtggtttaaaacctttctaaattcacatgacatttacagcttagaaagaaatttaaagaatttgtagaaattcttttctgtcaaattggatcatcagaagtcaaagaccaatgggattagatttcttttaggaagaatttccaataaaatataactgattaagtacaaataactctattgaatccatagactaaatctcataaaagaaaagaaagctaagatggacaggtgatacaataagaatttgcttaatttaaattgaaaaaaatgtagttcaaaacaacaaaatgaactcgtttttcactgtaaaaatctattttcactaatgctttgcttttataaactgaaccattatcaaaatattataattgttgtggacatcagaaggaaagatttataagaacctttattttaaaacaaagagaaatagacaatccaccccctgaaaagtcttcacttagcattggagaaaatgaaaaagaccctttcacaacccagctcagggttggcaagctctgcaacgtgccagttagtaaatattttagatgggctgtattctaacgacttaattctgccctgcagcacaaaagcagcatcaggcaacacagagctaataggcacggttgtgttccaatacaacttagtttatattcactgaaatttcaatttcctataattttcaagtgtcacaaaatatcacacttcttttgttttttcctacactttcgaaaatggaaatgccatttttagctcacaggtcttagaaaaccaggtggtagactgcttttgccctggcgtaaaccctgggacctgggtggcccagtggtattttcaaaatccagaagactagttaatgggcaggaaaaggaaaagtcaggaagtttggattttgttattggaacagacataatctacatatttatcttaaatgccaccaatatgaccaaggcgattctaacacattaagtatgctaaagttttgcatttgatttgcaaaatgactttttttttattttgaggcttaacattatgagtgattcttattccaagagtacctactcagggacctatgcactactcggtctttgttctagaaagtatggaaacacttcgaaaccttcaatgttaattgtagaaggatttatagttgaaaagtctgtatgattattcactatgtcctctatttcaaatatgatatatggattctttgaatatgtttaaatatctcctgattcaaggtaaattaatatatgtttgtctcaaataccagtaatgtttgtatttggtcattatgtgattaaaacattactgtattcctgctgaactttattctggcatggctaagtgattagcagttttaacatcaaatacagattgtattgattaagtagttctggcagtgactaacatttatccttagaattaactgaattatccaatctttcttgaactatctatttttacataggcattaacagttcaagtgtctcagggacaatgactcagaattgggtaattatccagttatttcctgttaactgttgagaatgccttactcatgatgctgagtaagctttgtagtaacaaaaagagacccacttacatcctcggaataggaaatagattagtctcccctgcagtgctgctgcttccttcactgtccacgctatacccactgccaaagctgctgcccgaggagccggtggacacagagctttctgcaggccggtgattgggaggctttgctgcatggtgtgggaagattcaacaccacagtcaataaatgaagctgacattgatctacaaatgcatcattatacatcttcttaatttacatgtgacaagaaacagctactgaagaactctacatttttcaacccgccttttcgtttcctttactgataatgaatggtggcaacaataaattattttactgtttttattggacatcaaggaaaagcaatcacctttagggaaaaacacatttaatttttagaccaagttaaatagtatgtaactatgctactattattatttttgtggtttctttgtacagtattgcaaaaatgatatggtaaataaaaagaattttggctatttcatggagaaaagaatttagaaagacttgggtagatagaaatggcaagataaagaaaattgcttatttttttcctattactagactataatctgtttttctccttagaaacaaaaatgcaaaatagaattttaagaagtgattgaaaattctgtttgtttgtatgtacctctgcctactatctccagcaaggttttaaaatttaaagatatttgtttcttttcaggcatttcctagtttatcattgagacttgtctcaagaatttcctaagtttgatatttgaatataagaatccatattcccatacagacattacaaatttgtgcaataaattatgcagtaggggtatagtactaatattgttgtcagatttgagaagaaattttgatgcaaaaagaaggaagataaggcaagtgtttccctgattttgctggggagaagtttctctagtaagtttttgaaatcgttgatatttgtcttccgccagagagagtgaacttttcggtcacaccgatctggttttgactcccaacccactctttagcaactgtacactgcttttctcatttgaaaacaatgggagtcagtaatgcctacctcataaaattgtgattatgaggagtgagatatgtaggagcccagtaacttactcttcttcctcttgtgatattatttgccacatcaccactcttctcatgggctttactgtcaacagctgtttcttactgtctttgagcttaaatagtctttgacaatgaatttaactctattctcttctcaaggtatccccactcttctcaagggctttactgtcaacagctgtttcttactgtctttgagcttaaatagtctttgacaatgaatttaactctattctcttctcaaggtatccccactcttctcaagggctttactgtcaacagctgtttcttactgtctttgagcttaaatagtctttgacaatgaatttaactctattctcttctcaaggtatccccactcttctcaagggctttactgtcaacagctgtttcttactgtctttgagcttaaatagtctttgacaatgaatttaactctattctcttctaaatctagatgtgttcaaacctacagttctacttagagtcttttttcttcataaatgcgtccctatcccattaggagtttattagccagttggatagagttatactaatgggtgaacagttgataatcatttcacgatcctaagatatctacatatttcttaaggatatgtataaaaacacaattattcttaatctggtggaattttaaccaatataataaccacatgaagtgaaacacataaacattgtgtgggaaaccatttgaggacaggaaatccaccctcagggtagctaggatcaagtcttgcaaaggatttaacttttcccccatttcttcactttttcaatttcgtcggtagcaggttctctaaagccacaaggaatttttatatatattccagtggtagtaggatcccttcccgagaatagggaacaagaaagaaattgttaatagttagtcaattgtatatcagatgtgtataagttagaaacggctatttaggaaaatgtgttcctaacttatagacatctgatatacaattgactaattgaactgaatgctgttaaacaaccagtcatcaaggaattgctagtaacccacaggactggatttgtggaaacagaatagttatgtttctgaatattttctttattttatgtagaagaaacccagatggtgtagttagtgttaaaaaaaacttcttaaaagaataattttaaaaatgtaaaggtaatgtgagtaggatgtaaaatgatggacatgtataaagtagattaaaatgcataacctacataatgagtcagattagtcaattgattataaacaaaagaaagctgtcatactttttgatgggattctataatccaattcataatttttagtatgacattgaatggaagacattaatttcatcaattggaaaatcacaatttactattttcaaagataaaccttaattattagacactaatattcaatcaatttatatttattaaattaaaataattttaattcaagagcaaactcacaatgaacaaaaatagctacattataaaaatgatttattatctatgtttcaaaatcgtccatcctttgttttgtcaactttggttttacctgatgcgatttttagttctattcctcttctggaaaagttgagaaatgtgtacagaatataaaatagcataataagaagaaagaaacaaagctagaaataaatttaagaaaagacaggttttttttccatcttgccaatctctttgaatagaattctcattttgaaagcctgtgcaagtgttgtcaatattttaaatgcaaacaaataacattttataagaaatattaaaaaagaaaaccaaatccaggggacatttacctatgatggaatcagtctaacatctctgcaaaacatgattacatctaaggttctgtctatggaaattttaggcagttagaaattaggtgaataattcaaatgaatctagttatttggagttatcacaacaaaacatccggtgctggattaaattctgtattcttaacttggtatctaagtgtagtgcagagatatatagcctcacatttggttagtttctgaaaaatgaattaaattaaaacacacaacagatcttttcttcttgctgggctgtatctgcatatcataaaatgtgataaaacaaaaaatggagaggttttgataagctggttctaagaatccgtattttaatatatcttttccagatacttgaaacatgtatttactcatttctttctcttgaaacagacttcaagaaataaaacatcaattctattaaattgagctaaatctgcataaaggcaaacttttttttaacaaataaagtgtatttaggactttattatctgaggctggatcttaggtaatttcaagacatctaataatttccaccacattctttattttgcctctcaaaagagttttttattggtctggtctttccaaatatatctcttgtaattctccttcaaacactttacatggaagccctctcagtccattcactctggctccctttggtttggcttttttctttccaactttactaagctctcttttatcccatcactttcttgtatctaaattaaagttatctgtaaaggcctagctcagaaatcacctgcttcatgcatttttcctcattctcccattcagaagtgacctctcctatgtctggactcttgtagcacatactctgtcgttattggaagcaaagcctatgttttctccttggtaacttccttaaaagcttgtcccggaaccatgtttgaacaatatttaatgaataagtaataataataataatacattaatacttctttcctttaaccaatcaaaacatctgaatgatttagtagataatttcactttttaaatcaagctttgtgttttatacaaatcataaatttctcaacaagaagtccacttgatatggaagctttttttccatgttctttgtcaaagaaactttagggagtcattttttttagcttttaaaatcagagataactttactctgtcatactgtatagaaaaaggtgatcattcaactatattttttaaccccaatctcccaaaacactggtttgattgaaggaaatatttaatgagaatacactaaccatcagagattataagcttatgaatttcaaaaagttcataatcacaaatattacatatatatttaaaatgaaagtgacaaaagaaaataatatgtagagtaacattctgtgggagccagcactattacagactctagaacttgtcctgatcccatgtttgtatgtaggtagttggagagctctgggttatatttaagtgtaatatatctctattttttatgttattgagggaaataatattttaaacacactaagtataatcttccataattttataatttcaaaatcaaaaatttagaaatattcaacttctgctttattcttccaactcttttaattagagtttcagaaaccaaggacctactatgtgtgaatgtattacacacctgtgtattacatatgaaaaaagtttatataaacattgagaggcttttcttagtaataagatacatctttggggccattttttatgaattacatttttgtgtctactttctttttgaaatcttaagtgtattactaagtaccaagtaaaggaaagagtggatgctataaatatatgatagaatcagctcactcatagaaagggtcctgtgccctaaaagaataaatcttagaacgttgaatcatttttgtaactcaattaattgagggggcatttcaggtaaacaaatgttaccttctgtgatgcaattcaatctgttttaaattattctttgaccatttcactttctttggctgttagatggttcaacatcattgtgttttattactccattgtggctaaccttaattaaatcggtagtgtctctttgactgcacatctgtcttcaattagtttgctctgttggcttttcttccctctaccacacagtacttaaatatgcaaagctatcactgtacttaccacatgatggcagcactttgctctgagagcacggattaaattgtagacttcacttttactacttttatatcacatccagttatctgaaatttaaaaggcaaggtctctgcctatcctactaaattccaaaaaattagtgtttggaatgtaaataggttgctgtctatgatgttccattattggttttatatctttggtccagcacagagctatttccaaatattctgaggagtaatttattatgtaggtagcttgtactttcccaaattacttggttaatacagtagtaaatatcttcctagatacagtctctaaaattttaagattaaccgaaataaaaagcaatcaataattttgtttattccaatacttaatgatggaacggaaataactacctagcagttttagaaatcaagtatttgggaatttttaccccctgtagctagctttaatttagctagtatttacttcaggtacctttctcctctctttctttgtttctttctctgtccatccctctttcctttccttcttccctcctcctgtctctgtcatctacctgttgttattgctgttactgtttttgttttttgatatttttactaaagggattttgcagttttatctcatgttttaattttcttttgaacgtggacctgaaaatttcaggttttaagtgtcattgtgccagcattatttggaatgttttcccttgaattatgtacaatcacacttcatgtatgttttctattacagttcaggggttctagtttaagaagaggtactgcatcttaaaagtaatttagaagtttaatttttttccaaatctacttcagtataattattatctatttgggaaaatctaaagcaaactggacactagaaaaatgggctagcttcaatagagctatttgtagttttcacacaccaccaaatcacaagttttcacaaatacaggtgttgaaactctgatatctctatcagtcatttgtaagtcgttaggcatggaagttgaaggaaggatgtcattgacaatttcttttttaaatgacaaattattagatgactattagtcattacagatatattttatatatatatgtaaacaatatatctattataaaggtatgacaagtcatgagaaatggaatgttgcaggcttttttcttataaaaataaaaatatttcccttaagatatgtcatattcacatagtagctccttttagagaagaagatgaagacgggttgcctccatttgctgtgttccagaaagatggtaaatctcgtatattcacagttttctctctccatgcacattggccttatgactgaattcttaatgacatcttaatgaacaatttagtttgtttataatgattcattatctggctttatagataataagatcaatgatcacttcaggaaacagaagtaatcgtataaaacaatgtaacaaatgaaaatgaagttagcttaactaatagcacggtatagaggaattttttcttacatgaaaaaatacatgttggctccgtatactataatccttgcttttaaaaggaaatcataatgttgccttttaagtaggtcttcctttttttgaggggtttttagttcagaagtgattttggaagaaaccacttaaaatatagtttaagtgagaattaaaattgtatagtaaataatgaaagaaagtttgactaagacattatcatagatgaaaattaagaaagtaaattcattttgtctttaataaattcaggccgtaattccagctatgttcgaataaatagaatgaaaaaagaatgtatccagtgctgagttccggtttggtgctataaaatgcaaatacaataatgatctttatctttaaaagattaatagcatgggggatcatatgtgaaagaaaaaacattcaattttgagctacatcaaattttcatgggcgatttttaatttttcaatcttccttttattctcttttgaagcagaagcattttctttcttgctgtttgcttgcactacacttgcattaggctgtcagataggtatttccaactgacaattggagaaaaaaaaaactcaagcaggaataaagactactgtaaaacatgcaggtttgtttgagtaaaaagtcattctaaaaatagtcattttgaaaaaagttcttacataatcctgaaactgtgagaacttacatcacgactgcttagataacaagaatgctgtccttaaatggaatccgaacattttgaaaattcattaaattttgcccaaatgaaaaaggttgagcacatttccagtttgttttcatattattccaatttggtcaatggccacgaagtaaagaggaagtttggacagttatttgataaatgcacgtctggtctcatgagacctaacctctctagctaatgtcattaatctttctccaaacagattatattaatgatctattaatctataacaatcatttcatcaatctttctccaaatagatccttaaaaaatactttctgtctatatatagatggttatattgcagtggattgtacaggttatgatagaaccagaggcagaacaaataaattataattaattatattttccagatatttttaaacatgatgatgtttggttgcacctaaatgtaaatcagtgaccaattgcatttttctttttcctctcagttgaagatagacaaaactcacttttctgactcttcataattttttccagatacctttaaattgattattcaataaatattactagcatgagagattcatgaagacagtaatatttgtctattttgtttgctgtagtatcaccaacaccttgaagaggttctgtgacattatttgcactaaaaataatatcagcaaatgtatgtaaaaatgatgacctaataaaagtaattcagatcatatttttcataaatgataarcacgtttgcaaatatccttttggcattaaatattttgaaactcatcaaattatatacttgaaattgaggatcaagtatttcgtaagaagctttccatttttcctcaaatttgaatgaaagtgataatcttcagtttttctattgttatgccaatacaattaatttccactatatgggatcagtaatgtagataatggaagatgaaattaattgataatttataaacaactgtttttctataaatgttactttcaagataagaacaaaaaattttattctacctttataacacttctgtcactctacttcagcttggaagcagcttgattaaagctgataggcaacttatgaaatttcaaaaggaaaaagtaacaattacggatgtgtaaatataatttaatctatatcattcccaataaaataaaaaattgctatataaattgaaaaaatgtcatttgtcaatcttaataattataaattaacatcaaatgagaaaggaaagaaggggttctgaaatgcaatagaagagatatataagatacagaaaatttggagacaaacatgataaacatgttttggaagaagtccttggttattcagtctttgactattgtaaaaattatgattgtgcataagtctaagttggtgacttttatatatttttaagcttaaatatatttaaacacttcaacataatttaatttataataatttataaattataatttaatatacttaaatgtttaagctggacaacaagcttaaatattttagtcttatcttagaacttatttaataatccaaagaactttatgttatgtaggttatatctactgatatttatcatattcaaaataaataaaacattaaaacaaaaaatcaacaagcacatattccattagtcatcaaagcaatgataacatgacaccttatgtagctgctggaaaactccactgtacactcgagaaaaaaatgagagcaaaaaagcaaataacatgttaatcttctyaagaatattttgaccttgcagatccctgaaagggtttctgggacatcccccgcccctaccaggaatcagtgagaattactggtcaagacccacagtcatggaaatgaagtactgtgaaaaatgagaagaaactgattagcatcagtttctttgacagtcaccttaacaattacatatgtcaagatcattttatcatgctatttatttttaattttgtgttttgtactgaaaaaaatatcaagttttcagctttcttgaagagattcattattgatattagcattcattttaattgtctctaagcttcttgtttcactcagaacttcacaactctagaaatatatggcatgaattaaaaatatattttatcataaaatcttgtctatttttggttaaaaacgaacaaaacaagaaaataactatgttattgtgcacagaaacccggagtaaataatgataattggcaggcataaaataatgcagattcttccataaagaggttttgtgttcataaagtatcttttgtacattaataatagttggatggaagcaaaatggtgattcaatagttattgactttattaaatgtcattggcaatgaggatgctttaaaacaaaaactacayaatagacctatatagaaagacatttgaattaggtagttgtaaaaatatgttttctatatttctctatattccaagttctttttataaaaagaatcagataaaaatacagtgtgatctatagaacttgaaatacatggttttcaatttgaaatgttttaatgaggaaaagtgaattttgctatgttctttttaagaacaatatggtagaaattatatttctctacctttcttatacatttggaaatagaaacctgtgatcctgacttttaccaaacatttcttctgaaaaatttttctgccttgtttgagttgtggtattaggttggtgcaaaagtgattgccggttttgccattactttcaatggtaaaaaccaccattactttttgcaccaacctaatattattttgattaatctgttcaaattataattaaattaacgaattatacttttcagtatctaaaacacattaaaatataaaatgatggttagatctacgtcattcctattcacacatctaccaaactcaacaccccgatcaaaattttatatttcggatataatttggtttcatttgaaaattcatgtgtttttggctttttagtgattcattatatatttacatgtacagcacagtaataaaaatggaaaagaatattttcatggtcttgttcagtatacatgaaaattcccttcatcttaccccatacccacgtttcttcccccagatcatgttgcacaatgragaatgggtgaaatattatggtttacatgatgtatgtaatacatgtggatgaaaagtggaaaaataactaagcatttcatggatagttacatatctggatttggggactattattaaatcaacaattagtgtctttggcattcctctaccactccttgggcagcatatccctggttccatgatcctcctatccaagtgagaaagttgcctgccccatgctcttattgtaccctgactgccccccactgtgtctccattggcattctcattgccctcccccatcagcatttacttgcctgtcttacttccacaggtcctgctccctggtggtaatttgatgaactaactttttgaaaataattgcattacaaaaactaggctttatgggtattatttttaaagacatgtcataaataatatttaagaaaccttggtatgttaaaatttaggcctttctcttcttcttagatcatatattaatagtctcatcctcattatttaggcccatagctagaccatatgactaaggcataacaattttgaagccaagtttggtgtttagatgggccagttggtcttacttttcacgtcagatgaaatgaacatataaatccccattgtggaccagaccaaagtatgcagatggctcggtgcagatccatggctactactggaaaagaacagaagtacccattgatggtaggtcagtgaattcatcttcaggaatgaagatccataaacaagagatagtgtgatatggtcagagttctacatttactgtctgattctgtatgtatagcagaggtatttccagcaataaatttaaatgactatagaaatatttgaaaatgcatagtcaatcattccaagaaaatgtagaatctctcaaaaccaaaacgttagaaaagcattttgattttcacagacaacaaaataaatccttatcaccagagaaataggtatagaactctgaaagctgaaattgtccaaattgattctctcagattttgttggatgtttgctatgcgcatgtcattacagtttgaattttctttttattttaaactgctcaaggtttaaaaaatttttttgcacaaacacatggaaatgaggaatgtaaaatttgtttttattaatcttgtacatacaatgttaaagaagacttcacctccaaatgaaattgatttctcttatgctttttcctttatttttcttatgggcctgacctttacagaaacagggaaggctaaattccttctgaccagaagtgatcatctgcttctggtcaaaagaaaatgggatgctgattagctactatcatctgtacccagcaattccctccactcccagtcccacccactcccaaacccatccacccactaccacttgcccaaggcagcagctcccacagagtgatggcttagtaagagttcaccaaggcaacacatggatatgaaactcttctttgacaggtgccgcaaatgagctttattgaaagcggagtttccagtagtggtctgtggaagtagcatcaggcttttctcctacaattcagccacatcagggaactcgaaatcatatttccttgcatgacctatttaataatttattgtctcacctaatctctccaacctgtcccagtggctcttgttttattgaccagggtagagggatatttctcctcatcctgtattgcctatttctaaatttaaaactcatacctaaaatcttagtatcaaacaaaaatagctcaggtttttcamacttaaatttagtatattggatttcaactaaataaatcttcaaggttttaggaatgcttcaacttgttttggtcttgatatagttttcaaacaaaccaacaaataaaaaatcttttgaaatggcaaggtttgtgttcaaccaaaccaactagcatggggaaaacaacaacaacaaccgaaaacatttccagaggtttttaactacggagagttgtttaggcctcaggatgtttttgcacaatctgtctaatctttcccgtcaggtgttttagcatacaactaaaccccagagggaaagaaaaaattccttttgactcactccataattcttgtttgacccatattttatgctagttcaagcagaaatctgctgagaagcttacaaaaaatctttgaaaagctctttagggacaattttgtcactcttgatagaaatgcctacagatggacccgcagccttttctaatggagctacaaacattgcctaatgcctcactgggcttgcacagtgggaaggcttccttttgttgggttaaatcaacaacctttagaaaggaggaccatgtaggcagagagtataaatggaattccgccatcatttccagctacctctaatcgtttgtaagaacttaagagataagtcataaataagtacatgactgttcttattaaaattaggagagtttgattttaaaggagacaatgtattcaaaaattataactcaaaaagtcacaagacaatgttatatttgtcggttctgaaaatttctagctgtgtgttcttatatcagccagcctacccctctgactctgattgctcacgcataaaacagggataagaatattgaaataacyacctcatccacttaatgtgataaaatgagaaatggatgacaaaacactctgtacaacatgaagaactattcaaatgcagagtattattttcagaatgcggatgggattatacgaactccattgtgaggtttgaaatgggacacttttatctcaacacttatgattattactaatacttctgcagttagtgaacaggaacttgcaggttctttttatatgtttgtatctctgcctagtttttctctctgcactttaaacaaattatattgcattttatataaatttaacactatagtatgtttgcytgaagtgcctggaaatatacatggatcaattatattgttacacttataatagcagaaaaattatactttagaaaacaaggctttttaatttatcgtctattagaacaaaattaaacatgaaagcatgctgtgttatctagttttcctttcaattatgattttaatgaagagtgacttctaagtcaatcacaagactaaatgtttgagaatatctattagaacactattcaaaaaaagggattaaaaacactttaatataaattttaaggactatgtctaggaagaaaatcatataaaatgtcatatagaaacacttaagtcacaataattaaaaataaggtgtgaaataagggaagtgtttgattactgtgaaatttataattgaaagaatatttaaagaacgtgaataacatgaagaaatcaactgaacttatttgatggaagaaaaggtgagaggtggaattttaaaaatgaaagttttagtaaggctaacaagaaaaaagaaattgtgctttgatgataatctataaactgggctgagtaacacatattcagaattatcctaatgtttaagctgattgtttccttaattacctaatttaggaaacacctcagtggtttacctctgtaatgcgacatatatcttacattgccaccacatatataattaatagggagaaggacatatgaaatgtttttaattttatgagaataaaaagaacgcaataggaaagtataaggcttgattttaattttgtgccaaatatagactcataaaatcaaatattttagggctgagaggtacttaagggggcaaatagtactatcctattttaaaaaaacattattttaatatgtgcttttgaattaaatttgaagataattgtataatcaccctagcttcattccttgtcactggcagtggcactctttcttgggggaaaattctagcaatgttggggtcaggttacagatggatgtaaatttgctttcctttctgaacagagctatgagttgaaggttggccacttctgcaaagcaagagctcatggaatttaccttcctctatccaggaacctgagaagattgcaaagtagatcagacgtgggagagagaaatagcagaagtgttgcctagggcagcccaatcccattatttatttacattttaatgcaatctctgatgctttcatttggtgacaattttccatctatcttatagtgtttccaagatggaactttgtcctgctctcaaatgtccaatcattacagctgtcactagcaatgaggcagtaattaaaatctattgcaacgaaatcaattgagaaaacaaaactgacacattcattttaagctgcatcatataacaatggctcagaacccagtagtttatgaatgaaataaagatactttatttattacacaggcacttggagattcacatgcccaacacatctgatacacttaacaactatggaaacacgagtggaaaatgtctgtttgtaggatcaagagagaactttcaccatgtaaaggtaaatgagtgcattaacaatttttcctttactttcctctaagaattttcaaaatccactaaatttttaaaagttacacttgaaataataggcaamaaacactgatccacattccaactggtaggctaacttgaactgtgagcaatttaaacttttatcacaatgaaacatatttatagtcatgcttgaacagattaggttagtagcatgcattccattctgcaatatgaatattgttaatctatttcccaacaaaagtcaaaagatgcccagtgcatagaaaaatacaaatcactgtagtcaatatattacgggactgatcttgggacttacatggtgatgatgaagtcctgaaatgccatgcccacaaaagcacattaaaaagtggataaacatattttatcagacaatctctaaaaattaargatgagagctttaaatttggggatgttcttgctgtgtgctttgaacagggcctttctgctcacctccttctggcttgactggtccatcagacatcaccttcctgagggctagctggctttggtcttggttgccattggctggtggaggcagattatcagactgagttctttgaatggggaggactcctgctatgctgtgtctgtgctgcttcctggcatgattagactgaccgcttttatgtgctgctgtggcagtgtgggtgaaatggaaacccagagtatgtatcctcagatggaaccagcttaaatgttattcatgcaaacagaagtgctcttttgctctatttaaataggttgtgttttcaaatgccaaaatgacaccacatgcacagcactaaaggggtttaaaactggctgtttctttgaaaatgatgactagggagatggagagaacaatgatctatctccattgcctggctaatgccttttagaagtaacagggtacctacatttgtgaaatatttgcacatattaagtttttatataattatatcaatcgactaaattttcacaaatgaaatgaaaatacagcagttaagataggtcaattgttatactttgattgacttatagctaccagacatagtatatcttgatttccaatggttagaaaaaatatctgtaaaatctgtcatcacatacaaagtgtgatccaacagaatggacccaattgtgctcctcagtgaggttgcattgccttatcacatatgcttatacatatattaatttaatgtagttttttgagaatgtaagaaataagattttcttcacagatttttcagaagactacaattttttgcacatggaaagctaccatatttcagaagcaaaatttgttagtgttttaaagcactgtcttgaaatggcttttcctccaaggttctagaagttgactgttggttgcattatcttctgcctagactttttgagtgttttcagatacaagaatctaattgcaaatctgctctaaatacttatatgtgtgcacttttttttttttggtataagtcctggaaaactggcagccacttgtgcttataatttctgtattctaaaagatatttaagcgcaaacaaaaaggacacacaacattgctttgcttccaaacatcacagacactgtatcaaatgctakgagccaggttggatggatggtggaaacaaaggagaaacagccagttttatttcagtctatgtaaataaaaaaaatctaaataagaaagagcatattaatgtatttatatcgttcttacacagacaaagggacagagaacagggtgagcagaggatgttgaaaactgaaagcaaacaggaaaggacagcaggaaagaaaggcaacagatgaacattaagctgccatgctgaggaatttatttgcgtcttttacttggttgaatgcggagttgttgcacggcagcttcggcagcagctatggcagcccctgcatcttccaggtgggtctgagtgacgctggttttgctttgactgcgagatggtccatgagaacggagatggccttctgatgatgattttgagctaccaggactactatgggatttctcaatggtgggaacctgcatgtctggtcacaaaagggtaaaacatgagttaaagttgttccagcattcctcctatcaagcttggtttacacataatttgaaactgcctaaaatttatgttaattctgagtcttatatgattcatttatgcaactggtcatcatacagaatgatgattaaacatctgggaaacaatttgggggaggaaaggcaaaaggatgatagcaatgagaagagagaactttgaaaaaagaaatacattctgactagcttctagtaataaatatgttaacttttagtttcaccaagcacctctgctaattccagcagaggtcaggtaggagacaatacacaggaggagttttaagcaaaaacaggatgaaggatgtgaatcactaggacatattaagtgtggagattgtagaatcatgcctcaaaccattgtagagaatgtatggatcacgtatttcctaaggcagtcatagaaagagatctttatactaatgatcatgcagtatgttaagcaagataagagttgagatggctaagtggaacccataaatgatctataaaactcattcataaataatctacaaaactcgtagtcagcagtttatgatatcaactcagtggcctactggacatggactcactttctcatctcctagaacacttgcatttatgattcagagaatctcatgtacaaagaaccactttacaatttgctggactttcctagaaaaggtgacaaggaagtaatactcaagtccaatataaaaattatatttaatacttacaaatagttcagtatatctaggtaaggtaccacwtgttttatcccacagaggcagtagctcagtttatgatgaggattaatgttgtgttgtaggacagttggttatgaacctctcaaaggaaaagctcatttgaatgagagtgctgtacatatttgcatattgccaaacccaatgtatggcactgttatttaaaaaataataatagttattaaaaaattagcttgagtccaacatttaggaaagacttaagtaaatttcagcataccaattgttttgatgacaggggaaaatattctttgtatgataaataaaaagtagcatgcaaaattatatttattgggtaagacaatatttatggacaaccagagattcaaacaattagaaggattataacttaatgataatgatgattatgtctagtcaatgaactcgtagggatttttgtattatctttatgaaatacccaaatgcattttctgaaatcatgttatcatggattttgaggtggaatagaccaaatagctcattttacatgttgaaattggacagttagagaagtgaagattacaaagtactacacctaagtatgggtgatgatctgagaataaagcccatttctcctgattccactctttgcatgacattatattaagtattttccagtcgtgtctaatctattaatataggttaaatgtacaaacattcacactaagaagatacagactgaacaaatagacacaaaactttttctacttaaaaaaatatttcctaccctttgatgggtcagggaagataccatggcttctgcttttgataacagatggctttggggactgctggctgctctgactggaatgagacttgccatgatcaatgctttcagtctgttctttgagaggataccaccttggagtgttatcgaggtgagmtgtgctagataaatcaatcaatacctgaaaaaaagtgtaacaaataaatgaaatttagggactaaagtataattgattcattactttttctatgttctaaaatttattcaaggatataaaccaaggaatacagtataacttttgaggatgatgattctttcttcctcagttttcttcaccaatgatactggaaacaatgtcttttacatactagatgcttaataaatgtttgcttgaactgaactgtataaaatttttgactattaactaaattatttggatatgatgttaaaagatagggtcacaagtcaatctgttcataaaacaaaacttctttttgttgtaagaacttattttaatcttacacggtgaaatcccgtctctgctaaaaatacaaaaaaaaaaaattagctgggcgtggtggcgggcacctgtagtcccagctgtgtgggaggctgaggcaggagaatggcatgaacccaggaggcagagcttgcagtgagctgagatcacaccactgcactccagcctgggcgacagagcaagattctgtctcaaaaaacaaacaaataaacaaacaaacaaaaactcataacttattttaatcttaaactggactagcaaccttgaaaaatgtttgattttagtcacaaaagggacaaaatggaaaagaatgagtaagttgcaattacaaasttatttattctattttaaaacatactttagttcacatttgaaatagggatatgactaccacattttgtcatggtttaattggcaactttttttttcttagtacattggtgcattttacagttgctgacatcttagatatgatgagctaaaaagaaatgaaaaccagaccaatggatatatgctttaggctcatgtaaacataagaccataaattagaaggacttcagtaagtcacttttttgaaatgaaacataaagtcaggcataayactaatctagagtactcctgcctaggatcaagattagtccaagtggctagagctggatggaactggaaggtaagggtcaaatgctccagttttggtgaaaagagatgtgcaaagtcttaagaaccaaacaagtcctcattatcaccttgattacacaaaaggatgtcgtattttgtaggttttggattttttggagattatttttaacattaattcataacttctgccctaagcagaacactaaacaatgtgtatgtgtgtatatatattatatatattatacataatatgtatagtatatatacattgtatatataacgtgtatatatacattatatatacactgtagacatacaattgtatacactgtatagtatatattatacattgtatatagacatatatacattgtatatacacatgatatatacaatatataaaatatatgtatatacaatgtataatatacgtatatataacatataatgtaaatgtgtatatatatacacaatgtgtacatatctacattatacatataatattcctatatataaacaatatgtgtatatattatgttcatatatataaacaatgtatatatataatagattaaaaatcacaagatctgttcaygctaccaatttcatgattatttgtttatttttaaatttttacaagtacatagtaagtgtatatatttatggggtatatgagatattctgatacaggcatacaattaggttattttgattccttgatgttaatgtaaaaattgtttttattgttttctcctacttgtagttttgcttcttaaaatgttttcagtgatttttctcagaatacttaattataaataacaatgcaatcaatatgtcacatcaaatcaattaaagaacctgtaaatgcatttttaaaagtccaggccattttataatataataaatttgttacttcaaatctcatttggactcacagtatgattacatatcttcctattgaaagaaaatttcatcttagaaattaattataaagtacatcaagtgatagagtgaaaaccatttcttgaattggtattaatctactcaaatagtaaatcaggaaataaattctatctgccagaagatttttttcagaaacggctatcttataaacttcagaaacatgctttgcatcgtgctttaattggtggtttaccatagcagcaaataagggaaaggaagtcrgaggcttacctccccaaggaagtcgttggatgaaaatctatcataatcccaaactgtcacctccagtgttttcttcttgagctatatagttcaaatagaaatctaattaaacctatctttccatcatacattttcattacacacatacagtagacatatttatttttttccttaaactccttccatttatgtgaaaatacttaaaattttaccgaaaactatgtagtttaaatattaaatattatgtaaaatttgaatgattttgcactctaaactagtgtttgatcatggggaacattattattttgtgaataaaatgataattcttacttatttattgtatccccacctcattttcaaaaatagaaatcagaatttataaatactctaaatataagaaattcatagattgcaaaaatgtctagtattatctagatgaagtattggattaaatgtttcagcaatttccaaaaaacttagtagcattgccttatttctgcaggtgagtttattttaaattcacaaacccagattataatttatatccagcttcatctttgtaatgaaattaatctactagaagacaaattaagaatctcattttgaaagacagttcacttgtaaattggtttatgtgggaactgtctttatagttttctctctgaattcaaccttatacatttcagttattgtctgttaagcaaagatataaaaatgcagattttcagaaatataataatgtaatttttgcctacagttacttatctstggtgataatcctttatactagtcatcattttgccttcttctgtagagattagcaccacaatgccagattcttaggaggcctcaatttagcaaagagatgagatcctaaaatattgtctagtggagtaatacagttctatgcactgaatcttattttttttgtgtattgtgtatgaaagtcaaaatatagccagttggaaaatgtgtttctctctcaaatatgataaatgtggcttagtctattaaaaattttaaattctgaaataacaaatggaaaatattccactagttttcttattttatttgtttatgttttggctgctttgtcaaaatgtgcacatttactttcaccctgtgcttaaatgtcactcatttttttccattggctacatttcttacatgtattttactcaactttttttgtttgattggcaaaatgtatacagatcccaatttttgaataattgtgttatcactgtacttatattagcctaattctgtcacctagaaataatcttgacatacctgttccatggaaatacttttataaattactgtttgattccactcaggattaagacttttctggacatgtttagtccttctcttgtactcagcactgaattgggagaaaagaaagagttatcttgattattcaccttagtttatgacttcacagttaaactaaaggacatgcagactattcaagatattttatttcaaatcactatataattatctcatcatcctcatgtcttaaaccttagtttaagttgaatgcacagtgacaatttaaaaatatgttggatgcttgtagttttctttgccctwatgatttttttttaaagaaatgcttgtaggtgttctaaatatactataatttcagaaatcttgctcattcctgaatgtaggagataattacatgaactaaatagtaacatcaatgttactgccccataaacaataatttggtgtttaaccttactatagttttgtacatacrgaaaagcaaaactaaaacattgtaatgagtgtactgagaaaaagatgaagaatggctgttgctgtggctcacattccataaacacttgttactgatatctaaagtatattccaacactcttggtaaagtatatttaatgcagttataaagcaattttaattaaatataaatttttggtttatgtcaatatgytattttacaattgatgaaccaaataaaaatctttcctcaattattagaacttgggacatctgcattaatccttgactttccatttcctctgagcaccaattagaagcttatatgctacacatttaaaaacaatttattttcaaagcctatcctaatgaagtctggcagaacatctatagctggcaccaacctgctgatggggttgaaattagattactgttacttgctattaccaaatggtgcccacacagacaaggcctttctctaactctcactgcttttttctgaattttctgcccaagcttatgtctcacgttctaaataatacttcatctgtggtgggcactagagtcctgtaaaccaacctctctgtctgggggtcttgacatgtgtctggatttcacaagttgcctttccctaaaagggggctggaccctgactcttgtaatctgtagttctattccaaactatagccagactaactcttgctacattcctggtctcaagtattgccatatcctggatgcctagaaattttccccagccactaatttacctatacattgtagagaaagctattgaggatcaaactccagctcaccactcacttttaaagatgggcctgcaggcaagtactttccctgtatctctgattttattttcttaccagtcagatacaagggaaataacgctcaacattgactgcataatgggatcacctgagttctggtggtgggaggtgggtcagtcaaccctccacccacttccctcttgcccctgcttactccccgaaggaaagtctgacttgattagtctgggatgaggcttgagtattaggatttttgaaggctcgcaggtgaatctaatatgtagcgaagattaagaagcaccgagttggtgtttcataacacttcacaagtcagccattgtgagctgaatccaactgaagaaataaagcagcattcctcgcacttcaacctatttgaatgtacacaattaagggcagaatttgacagctgtcactcaagataaattacaaagaattttagggaaatatacagacaatgatttaaagaaagaggagctctcatagactatggataggaagtttctatatatactttttagataaatttgtcaatatctagtgaagtttaagtttatatacccaaacatccaaatattcaatttctactaattccacttctgccatagagaaattctcctacctgtgaacaagaaatttgttcaagaacattaattgcaacattatttcaatagtaagccaatagaagaacgaataaatacattgtgatatattcatttcaatgaaatagtaagtggcactgaaaatcaattaaattttaaaagcctccatatgtcaagatagatacatcttgaaaaaagttttgatcaaaaacttaatatggtatggtataatggtataaacataaaatcatgtgaaataaggttacacattatatatacatgtatatatgacatacatatatattaatatcgtaagaaaacttgtaaattatgaatattaaattcaatttagtgagttttttaatggatagggaagtgatttcagagggcttcagggtattatcttttaaaaaatctaaaacaaatatagcaaaatcttaaaatttgacaaaattggatagcaagcacacaggtatttgttagggtattttctataatttttagtaaacttgaaatattttataatgaaaaattcaaaaatttttagtaagatatgttcctttaaatttagttttggattctttttttgatggtgacttagaactaatgacttaatttgatggtgatagaattagtgtctacaaaaaagtgtctacatagaaataatacatataaattaatacatagaaagagttaataactttaatttgatagtgacatagaaagaattagtgacgacttttaagttaatagtaaacttggattgctactttagaatcatggctattctcataggtgaatatacataggaaacaaacacatggtagtatgagttttaaagcctctgttttggacttacttatcaaggtggtgaggttatggaaaccatattaagatttataatacactgaacagtaataaaattatgttttttaagttctaaaaaatacataatttgtttaacaagatgggaattaatatcaaatgcaaacccatgtactatcactaaaattctgggtctgccaatacatattaaaatagtctgaagtagtattaaaatacctttgaagggatttatcagtcactatcttttcttaatccatacatgtgaataattgttattcaaatttttcaaatccacatttagtctttttttcacttatacacctagcaaaaattagtgaatgccaactctgtatcaggaattgtagatgtctatcaactaaaaaacccttaattgtattgacatatgagtatatatttaattcatgcatgaaaagcatttttaaaagtaagcatattaaaatcataactaacatttattaaatgcctcctttttcctctggtaaagttctaagtgcttttcatgtgttaactcatgtaatactcatattaaccccattatacaggtattacttcttactccattttataggtgagaaaacttgaagctcagaaaaattaaggygtattgtcaaagttgcatagttattaactggaccaggatccaaacataggtaatttgatttcttgcttttaaataaatgttatatgaactcaattgattaggcccatcataaaatgtgacatccatctattttcttaattgcaggcttcactacctgaagtatctagtttgtcttctttataatctaaaattctccatctcaatttaaatacataatttttatacatataatataaattatgtataatgtgtgtagacacgcattataaacatcgtgaacaagttaggccttctttagagttgcctagggaaattctgaatagtacatcckaagtgagtgttgtggaacaattacgcctacttattgtaaatactgatgtttggccagatacatttagaaataacctaaaytgattggacaaaagttaaaatgttcattttaatagagtatcttaatcatagtaatgagtttgattctccaattctctccagacctaaaacatcctttagaattaatgaaagtaaaaacagcttgctcctaaacaccaatgaaagcctttgcagtattttttgcccttgcatttcctgacatgcagagctggtcacacaaagccattcttcaataacagttgttttataactaccatgctctgatcatatcatacacaatttcaatgaactgtgttgccacctaacacaatttaaaactctacacaaaatagtcatatcaaaatctgtggagttgaaggtaggcaggkaaacagggggattcttaaatgtgagcataaagtcaggctgagaaataagtggagttcatcctccctttcctttcttgtctagtaaacacactatattctcttgtgggaagattacattaatgatttaacattaggacaattaggacaattatatctaataattaaagaagtttattaataagggaaaataaaaaggtcaatacataaagatgggacatggtgcttatcaaaaaatatctaaaacttcaccctcttgaagttttgccttgtttgttggtttgattatttattttttgagatggagtcttgctctgttgctcaggctggagtgcagtgcaatctcggctcactacaagctctgcctcctgggttcacgccattctcctgcctcagcctcctgagtagctgggactacagacacccaccaccatgcccggctaattttttttgtatttttagtagagacggggtttcaccatgttagcccggatggtcttgatctcctgaccccatgaaccaccctccttgggctcccaaagtgctggtggtttatttttttatttgtttttattggtcattttgtcatgcataggtatatatacttttaaggctgtctgaaaaaatttttgaaattcaattattctactcaagaccagcaggaaaacagtttccatgtacatattttttaatttcaaaagaaaaactgagaaaagataatgaaatttgaaggcttctttggtgtatctactttcataaaattrtctaaaacattgaaagtattcatttttaatgatttatctggttttcctttactaaacttactacacacacacacacacacacacacacacacacacacacacacacgtttttcaaaattactcctctgaggttatttctcttaatttagaaaaaatacaacttgcatcccattttgtaagctctgtttaatagtgcgatggtgtgcttattgtctatcattttattttcctctttgctctctgatggcagagactatatggctacattgtcaattgtaacccctgcacctggcacagtgtctgacacatagtctgtgctaagtaaatattcagtgatccttagaacatgcttgtattttgttttcctttaaaatctactgaagtaaaataaattttggacaccatattgtaaatacacacaccacctgtacctgctttccacaggtcccagaggaaatagtttgataggataccaatgttgtttagagaaaggtccagccaggaattgggcttccaggtataaagatagctaaaaataattatattcataacaaaatctcagtaatgagaaaatattttcacttcgctcaacagtgtgatgagagaaaaccagagcgaggcccttcatatatgctcatttccatttcttaattatccaacaggaagtattgagttcacgcacgacccagaccttttcctagtcattctctcaccttatcttgcctgacattttgcccctcaaagtttgagtatattgatcagagggtgggaagaaaaaartaaaggagacaaggaaaccaaatcagtgtactttttaactagctaacaggactcttattttaaatttaagaatgaaagatgtattacattttaatattaaagaaaagttgtttaattttctatatagtattttaaaataatttagtataattcagaagctcaagcattctgtacctttctgttgcagagataaccaaccactggtcgcaaaaaaatgtatgatacacattgctagcaataataataacaactactattgattgaaagcttattatgttccagacattatgcttatcacttttgatgtatttatttcatgtatttcacagaaggcctgggaagggagctgttattattcctattttgcagaagataaaatagttttagagaaatcttaaagcttctaagtgacagggctaaaattcaaacgcaagttcttaaggacctcacttattggcttccacagtctaacttacaatgtcagtaccttgtcaatataattccctcttacattgacaattctcaaagacatggtgaaagtgatttctagatgaaagatataagaaagtagcttctagatcttttaaatagttatttaagacatggtattatttataatttataaaatattctctcttttataagttaaatacaatctctatcattctgataattttccccaagtttctatatataaaagatagggagattctgaataatgtgattaataatatctgttctaaaaataacactatttctttgaaacaaaactaattttgcatatcagcctgagatacctggattgtgttctgtgatgagagaaccagccataacaaggaatctatcacagcgtcagttacattgtttgccataattatgtggctgtaaggaaacaaaaagtttctgggcaatagcaaggctgtggtaacaaatcctattgtttgaaatatttacgtatttatgcttttaaaaatcagaaacagcctcatttgggaaacagttcattcgtagtaaatatgtgaaattttaatgtcatagacaaaaacgaatgctgtaccattaataatctgggtgggattaaaattcccatcaccctattgctacagatcatacatgatttgccttcccaactaaatgacacatttaatttataatgcaatgagagatgtgcaaaataatgcttttggctatgtactaagaaattgtcttagttgacagtgtaatgatgcaacttgtcatgagctgtattagaaaacgctcctactattgggaacaaaggaagattaacttattgctaatatactacagcaagccaattatggcatcctacattgcatagcagaaattttgtggggcagaagttacaaaggcatgaaaatgtttcaacattaggttcaagtgagggaccaagttcaaacacctattatctttttttttgtttgtttgtttgtttgtttgtttgttttttgaggctggagtgcaggggtgcgatcttggctcactgcaagctccacctcctaggttcacgctattttcctgcctcagcctcccaagtagctgggactataggtgtccgccaccatgcctagctaagtttttgtgtttttagtagagacggggtttcactgtgttagctaggatggtctcgatctcctgaccttgtgatctgcccacctcggcctcccaaagtcctgggattacaggcgtgagccaccgtgcctgatgggatatacacctgcactggacatccagaagacccattaattacttttgaaaaatggctacagatatttttaatagaagactcgagaacttaaatcatgattattatgtgagaagctaaatgagttttagtgaatagattatgagactttagttatgtctaatttcatggtaataatatttttttcattgtttctatgcttttaatattttctacttttctgtgttctattgcacacatctgctaaagctatttagaaatatgctcagaacaatttgtcgcagtgctgattcaatagatacaaacatgtagaaaaatataagttacagcccatgttgaagtgccagtgaatgtacataaaaatgccaaaagtataattcaagacatagcagcagagcttgacactgaaagagaaacaactctaccttgcattctggacaaccatgacttgactgcattgattccaagagcgagagtgaaggggtaaaacaggaaagtagaaaagacaggaagaaaatagttaggaacagaaataagaaagaaaacatgaaaataataactagaggagctatcccataacataaatgacatgaggcagaaaatgctagaactacagtgaaaataataccttgcaagtgtaatacattccaaggcctttgcttgtctaataattaggmgtgtgattaaaagaaagacccaggaattgaataggggtagcttattagctgcctttgagccaaacctcaccaagtagggacgttttatttgacaaattgcatgaggatagctttaggtggggcatttgttctccatttcaccatggttcccaccattccttgttgcttaccccagaatggactgacagattcatgttacctgcctgtccttcctggttctttaagtttgtaacattctaattgacacatatcctgtaataaataaaagatagatactcccatattgtgtaaaagatgatattccaggatatcattagagaatatagaatataaacaacaatgctttattttcattctttcatttgcaaatgcttattacagacaaatccttggcagtgatttccccttgtatcataatattgtcataaataacattgaaggtctaataaatcaaaggcggaatgaagttatcagtttgttgttgttgttagactctaaaagatattgccaaattatagttacaactactatatatagatataaatgaattaacataaaacaaaaactaccttttcctatactatgtgactattggtaatctctacataaaattattggtttttcaaaatgttcaataaagtaaaactagagcaaccataccaacaattccaagtttttaaaataaaattattgagaaggatgaaattaaaagctgtgaactaactttgatatagcacctggcaatttaaaaattattttctgagtattatctaatttggttctcctgacaagctaaaaatgatgattctgcctacctcggctctcagggttgacaagaatactgaatctcaaagaaattggtgatctgcctgtggtgatataaatactaagcagcagattcaagggcagtgtatagctctaatttggatcctgtttaaacaaaccaactacagtaaaagaatacacttcatataattaaaatgcttttaaatttgccacagattattttatgtcctagaaaacagtctattttggtgaatgctccatgtgtacttgaagggaatatgtaatttgctattgatgggtagtatattctgtaaataccaattagatcatcaaaccagctaggaaaatattaagaggcaaccaaacaattatttgaaaaatttaaaattatgcttatacgaggtattaaggctatttttaaatgagttttatttttcagaaatatatactaaaatatttgcagaaataattataatagctgggatttacttccaagtaatctggattaagggagtgtatgaggaaaagaaacatgattggtcactaagtgataactgttgaggctgagtgatgggtacatggtgtgtcaaattattccttctacttgtgtaccacaatggaaaatttccaagttaaaaggaaaattcaaatatcactccacaaattaaaatgaaaatgaataaaaaataaaaccagtttctttaaattaccaactcaaagttctttttattttacctccatttgttgatcttatgtttccatcttgctaatttggctgatatgaattgctcaagtgaaggataataatttgtagggttcaaatcagtgctttgaaactatccttgagtactgacttatataccagaacacagcaatttgcattatgtgaaagttaaatatctccaaagaacacttgcttatatcaacaatttatacatcacacaagagattcaaagagatattttttatttatttaccaaagtcaatacttcaaatatcactttgtgctattttataatttttaaatcagtgatttggaaatatgtgtataaataaggatacatcaagaagccacttaatcaacactaacataatggaaaatacacatgtcctataaaaataaacagtaacttgtaagtccttgaatattgatttctcagataaatttgggaaggtaagccaattctttaactttgacacaaataattccttaaatgatttcatagtgaatctgatagttatcacaggagtggtttccagaattgaaaggctgatttgctctcttggaggctggtttcattatgatcactgttcttctacaaccctgtaaggcttaattacaagtttttaattccaccttatctactaattggaaataaataaatatgacatgtggaggaaagtaaggaaaagataataaagtcaattaaaatgaggtgtggaaattaaagagtagaaaatactatactattgttttaaagcatgagatgaagtacttcttaattttacttaccctctccctggaagaaggtacactttcacaaaagggtcagaataaccattgttgtctcgaggaacaagatttcttgcttggagaatatgtattatgagatttccaagatcatagttaatttgaagctttaggagagagaaaaatattccataagtttttaaaagcatgttatacattatcattcaatatttactagttttttttaaagaaaattcttataagaagcatcaactttcattttcattttatttgaaaccaaacagaccagttaatgtctaatttaattgagagctcccaggcatattttaattcctagcaaacatgctgttcattctttccacagtgaaaaggcctggcctgtttaaaagtttatttagaaggaaaatcataaggtagaatgctggttatcttttttaattaaattgctactcttaggaaaatagtaaatgttgttaatgtttattaacaacaattcctagaattttgaaaagaaattaactaattggtaaattattataaagtattatttgcattttgccaaataattagcagtggggtggaactgtcatttaaagataaagctgtcagcactgaaatgtaagaatatttaagaatacacagattattactttttaatgttatattatctgwtattaaacctatagatacctttcggtaccagctttcctaatagagtgagatactacaatactctttttttcttttaattttagaagctgaaaaaagaagagacattgctttatagatgcttattggctgctgcacaattgtggctgaatactaaaagacataattcaaacaaatatttgagaaaactgcrtaattcaaaataattgagttaagcatttttttcttctacaattgaaagactcttttggcatcatttagaataaagcttaattctgtttgatgttacttttgtttgttaaataatagagtggaagggatccatatttcaaagggcaaatccatatagaaagatactaacttttaaaataatccatataaaacagatatgctgcatttatatttaaaataggataactcagatgagtcatactttcctgtaaaacttcataatgaaataaatcctcattttagtataattttgatcttattatgtttcctgtcagaaaatacatattcaattgcttatctccatccagaaaagactagagtccctgaccataataaaagcacagtgaaaaagaaagcaaagtaccattaaagaagaggagaaaggggaagtttagaactctatgccatcatgcagcaactgtatgctataatctggtactgaaatacagaatataaaataacctgtaattaataccactgaaatttcaaacaacttcctgatctttatttaaggagaaacacttccccattctctcctttctctgccagccttagaatccacttttaagtgatgaagcacccaaaccgtttcttattgaaatgaaaacttgcaggccacccgaagagagtgcttttcaaaatttgctctgtatggccttagggaacatctagagttactcagggtcagctttgagagagaatgggatgccccagcaatcttcaatcacagcgactccagtgctgatagattcatggtttggttgtctacataagatttcatttgaaatgagcctttgctaaaataaaataataataataataattgaaatcactgccttacgaaaatatcccccaaattaagaaggaataatagtagggtaaatttcaactacagaattacatcttactccttaagggaaagcaaaataaaattagaaaaaacaacaacaataaaaacaaaaaacacagtccaaaagaaacactagtccaaggacagaagtttaaaaatagtaggaaagagaaagaaggctattaagaatcagaaattctagcattttctttgctgtttgtgaaatgaagaaagatcaagtcagtgaaaaacaggctttctggaagttggaaatagcagagaaacagccggatctggagtacagaggtcatcagggtagtactgttagtttgttcttagtaacstgtcaaccttctgcacattttctccatttccacgctcacactccacttctgctttgtagtaggttcctggataatcacttaattgatttctttgcctcaatgtcctccctttataatatttcttgtaggtcactgccatatgaatttttattacacattcttttcaaatagtctctctcttactccaaaatagagatcatggtatattatgtagtggctaacattcctaggattgtgttcaagtttctttttaatttagtcttaacctacttctcgaagctgattcttcaaccattactctcggacaacaatacctttaattgtactctttcttctccaggaacataatctccctttctttatgcttatcttcaaattaattcgagtttctgttatcctttgtgaagtcttttgtgaaaatttcctctagaatgtattagagatgcagctaagactctctttcatctgaaacatactgttttcaattagttactattttatagtgttaattctttctatatgctatttcttatttagtctaaattacttcttggtatcacctaaggtgcaggttttaaagttttatttttactatgacccacaatcagaaatatataaatatcaaaacacagagagaatttaaaaagatgattatctttttatttttatatatttttctttatctatttttattttattttcctgatgaaaattaattttataagttacaaagcagttatgacttatgctatgaaaaatacttctctacaaaaactattcagcaatttttaaagcaatttttgattaaaagaagaaaaaatcccagtagactcatgaaactcttaaagaggaaacttcaaatttccaggagaatctgtcatgtttaaaatacattcgacaaatataaagtaactgaggcacaaaacatgttgacactgctaagatatcaggcagatttcaaagtatagaaatacatagctatgattggacttcataaaacatatatttgtattaatatactattctataaaattgcatttttcctttacagttctgtatatattacagaataagaaaaatcctaacagtgtgtttacaatttcaacaaaccagtggcaaaacaaccaaaaaaggttatataatggcgactttttaaaaaacttcatacctgaatttctcctgtaattggatgagagacaacctttgttccatcggtaggctgtaatattaaagaacatatattacattaatagatacatttttcacataatttatcatttcggcttccttctgaaattagtttctatttggtcagagcaactgcttggaaaatatattttatccatttggctgcttcagaataatggtgtctacttacggttctcaatacacatttaattttacagatgcataaatctatttttcattttggtaagccggctttgaagctgtaattttataccagcagtattttcaattacttaagaaaatgaacactttaggtttaaagcacttaattaaagtatctacaggttttaaagatctatacagtaatgtttaaaatacattcaacaaataaaagattggtttaatacaagaactgccgaggagcacagaaggtagaaaagtccttctttcacttctttgctgaatgctcagcacctccctgctcccttccagagtgaatcacccactcaatcactttccctataaaaattccaaagaaatttttatagaactagtaaaacattcctaaaattcatttacagccacaaaagaccctaatagccaaagcaattttragctaaaagaacaaagccagaggaattatgctacttgatttcaaaatctactacaaagctatagtaatcaaagcagcatggtatggcwtaaaagcagacagacatatggaatggaacacaatagacaacccccaaataaatacattcatttacagtcaattgactttcagcaaagatgttaagaacacataatgggcaaaggatagtctctctaataaatggtaccaggaaaattggacatccacatgcagaggaataaacttagatccttatctcacaccatatacaaaaatcatctcaaaatagattaaagatttaaatataagacctgaaaatttaaaattattagagagaaacataagggaaaagctctatgacattggtctgaccaaagatttttttggagatgactccgaaagcacaggcaacaaaagcaaaaataaaaaatagaagtacaacaaactaaaagtcttttgcatagccaatcagcttctgctgattgtttcaatcaacagagtgaagagacaacctatagaatgtgagaaaatatttgcaaaccgtacatctgacagggtgttaatatccaaaatatacaagaaagtcaaacaactcaacagcaggaaaacaaataacctgaattaaaaatgggcagagatttggaatagacatttctcagaagaagacatacaaaggactaagaggtatataaaaaatcaacatcattaatcatcagagaaatacaaattaaaaccacaatgagatatcaactcaccccagtcaaaatggctgttatccaaaagaaaaaagatagtgagtgatggtgagaatgtggagaaagggaacccttgtacactgttggtgggaatgtaaattgatatatccataatggaaaacagtatggaggttcctcaaaaaaattaaaaatagagctaccatatgatccagcaatctcactgctgagcatatatccaaaggaaacgagatcagtatgtcagagataccaacactctcaggttcattgcagcattattcacaatagcccagatatagtaccaacctaagtgtctatcaattgatgattaggtaacgaaaatgtgttacatatacacaacagaatattatttagccttaaaaaacaaggaagtcctgtcatttgtaacaagatggataaacctgaaggacattatgttaagtggaataattcatgcacagagagataaatgccacattatctcactcatatgtggaatctaacaaagttgaacttatagaagcatagagaagaatggtagttaccaggggctaagagaaaaggaaggattggaatgatggtcaaagggtacaaacttctcttagaaggaagtcaaaagctctgttatacaacatggtgactacagttaatagtaaatgtatatattcttcaaaattgtgaagagagtagatttaaaaaaaatttttttaagccaaatatttcagaggaatgaagagtagatttcaagtgttcggaccacaaaaaaataagtgaggtaatccatgttaattagctcaatgtagccattccacaacgtattcattttttttttttttttggagacagagtctcactctgtcccctccggctagagtgcagtggtgtgatctctgmtcactgcaactccgcctcccatattcaagtgattctcccacctcagcctcctgagcagctgggactacaggcatgtgccaccagacctggctaatttttgtattttttggtagagatggggtttcactgtgttggttagggtggtctcgaactcctggtctcaagtgctctgcctctcctggcctcccaaaatgcggggattacaggcatgagccaccatgccaggccacaatgtatacatattttaaaacatcatgctgtacagtataaacatatacaagttttgttaattaaaaataatttaaaatttaaaaatctaagcaatattgcatgagatggttaattgcttaatttaaaaagaagttgtcttcaaatatgttcaaattgtatttttataacatagaaacatctacaaaacagaatttagtattaattatgttggtattttagttggctagtttatgaattatttttaaatgattatcaaaatagagcctctataaagtaattattcaaaattagcacataattgcttgtggtaaaatgtagttgtgttaaaatttattttaaaatttagcctaactgcctttgaaattactttgcttatgaagcttttctatatttagtttcaaacaaatcattttacgatgcaatgattaaggtcaacctacttttgttgtttgcttctgaataaaaggattctttttttggtgacatctgctgtatttttatagttaaaaaacaaactttattttttatgtctggtcacttgacctaagcatatacagcctgtccttcccatatatctcaccacataaagacaaacctttattcatttttaaacaaaaggacacttttttcgcatgtatttatcaactacagggatagtttttcttaagaatcaaatctatgagggaaatcataaattttgtatatttcctctgctttttataaggttaaaaaataattttatgcttttttaaattccccggcactttgaaacaatagcattggaagcatttgtttcgaatgaagatttgcatcaataaaaaaattcttaatatggaattgaggataaagttcaaagtagtgataacatgttactggttttccttgtttgttattgtcttaaattttctttatcactgtgtcctttttactttttacttaattataaaatctaatgtaatatgtaccttttgttccaaaaagatgcaaagctaatattctatatacgtatctcagattcatgcaacaacaaagagaaccagaaaatataaagtatcagagacatttttcaagttcctcataataactactgaaatatttaaaagatgtagaaatacatcatcttgatacatcttgatcagttttgtactcagaagagaaaaaatgtttcttgttttgatagatcatctggaaatgagaaatcataagaaaaatactttagaaaatgatattttattttctgtctctatgctgaataaagagctagaaaacaagtgggtcagaggtcacatcaacaatcctcaccttgctgctgccgtgcttctttttgctcactgagggggaccctggttgcccagggctgggaacggaactggatcctgctgatgtaggacctgaatgaacatgagatcctttttcaacaactgatgacagaaccagcggtgactgctgtagtgaaaccttctggagttctgctgccaactgcttaggatcaacccctggggatttcgccttatccactacaacaaaatgaaagagatttacatacttctccatttcataggtactttataccatggaactatgtgagttctaggtgacaaaggtaaaacattacctataaaataagctaaactttaaaaatgaaattaactctattgtacttttatgtatcaatttctaaggaagtctacaaggctctgagaagagtgacataatgctgaattacagaggaatagtgaagttcccgttgcatcttcagaaaaatgtttttaatattttacataaagaattgtttgaatgatgcaatatcctattttatccattggaacttaatttgtatgattagctgtttttccttccttaaattttacatagttctttctctaaggggaaaattttctaaggggaaaattttaatgggtttatttatatttacaaatgtattaaaattcgtatagcacttggtctattctgcttagtacaataacccagactactagaattgtggctgtcagagtaggaagtgctcaacaaaatttattaaacataggaaaaagtgatgtttttaatcttacaatggatttaacaaatttgtagrttatatttgttattcaagaaagagttaaatctatctcatcatgtacttatgaaattacatgttgatttttgtttactataaaaaggcaatgaaagagttcaggaataattttttcaaaaacccagttattctaaaaagaatcaagtacgctctaaaaattatgtaaaaccaaaawgaaatggctccaagcattactttcacaggatgaattcatatttaaagaattaaaactgtgaactcatgcagcaaggattttacgtgaacttgtttaaggggactaacatgcaaatatgtatttccccagaatgctaacactgtagctacaatgccctagattttgtttataattatataaatacataaaaaaatctatccataactttatatttgtctatatctgtgtttatgtctacatcttcatctacaattacatctgcctctgcaattacttctatttctatctctttatttacagttgaaactagatttcttttacctaccagcttttggtggctcatgaagttccagatgctgggaattttcagaatctgatagcatattgaggtccctaaaaattaaaacaaaacattaagaaagatattgaggaaatctgagacaaagagcacttttttccaactacccttaatttttttcataggtaaatgagaagtggttaatgatataaagcaactccaaagcatgcctaccatcctaacccaatatatatttgcaatgcagttaaaagtcagagctgataaaaatgattatttaaggtgaaatctttatgaattaaatgtaagttcatttttaaatacatatccatgaaatctaaatgggttcaggctttcatttaaatgaagcatgtttccataaaagcatgaaagggaagaggctgttgacacaatcagaaactaagttagctgaattctttctatgctttaggctttgattcactttattttataattccagaaaatcttgctaactggcaaaggttccaccttaacaattttaaattaaaagagtcatggatagccaaaaaatggaaacagaaagatggggaaaaactcacagtcttacacatatttctgcttccccactttgctgactaatgatactctgaacttcttcatatgttttagaagtcaagggaattccattccattccaatacttgcatccctagaaagacaaatttgaatataaaatcaaacgtgtgctatctctagtctgggtacatatggcattgaagacatttatttgcatttagaagtcaactcagcacaccattttagagaacatcagttccaagttctctgcaacattaataccaaaaccattatgtagtttgatctcattaacttacctgaacacataaaatatatttaatacaacatgcaaaattttgcttttgaaaatctgtgtaatattatcaaacgcatgcattctgttcacactgccataaaaaacattattgaatatatattgctcagaccaattttgtataggaaacaaacaaacaaacaattagaaaccccaatataattttcctgcggggaacaagctactagaagaatgtatttggtactttatcatgaaatgggagcagtagaaaaaagtcatttggatttctccatttcagaaactgttgtagcttctattttgtccagatgaaacagaatgccacttcgtgtctttttcttcacggtatgccagacatccctgaattgaggaatagcaggaatgttataggaagggcagctgcaggggtctgtgacctgtgcactagtacaaggccctgtgctcagaaaggcctatgcttggtttaatgctctgctgttgtcatcttgacattcttagtaacatttgaacaaggaacccacattttaattttgcactgggttttgtaaattatgtagctggcctggcctgacctggtcagggcatttcatttttcctctctatctagaaagataatttcatagaaaaaagaaaagtgtaacataattaatatttcaatattttacatctagctcctttggtccattttatatgacctgtcaaaatcattgaggggtccacgtgtggcatgattcacattgtcctgacatgcagctatgtgaactgggtacagtagatgaacccatccaagatagtgctcaaatatttgtgaacttcaccagctttatttgagaaaaatgtctatataccacaattatgttgttgaaccattagttagttttttttttttttttttttttttttaracaggtcccactctgtcgcccagactggagtgcagtggtgtaatctctgctcactgcaagctccgccttccaggttcaagcaattctcctgcctcagcctcccaagtagctgggattacaggtgtgcgccaccacgcctggctaatttttgtatttttagtagagacagagtttcaccatgttggccaggctggtctcaaactcctaacctcaaatgatccgcctgcctcagcctcccaaagtgctgggattataggcataagccactgtgcctggcctgaaccattaggtttttaatgagcttcacagatgcctatgtgaaattacctattgatcatcattggctccaatgggaaattctaaacatggcatgattgtatatttaaaagttttgatgattatgatatatattagaaagcatattaccagttgcaagtaagtaaaggaaaaacttttacactatagtcaaatggtaaaagaattccataaaaaggctcacaataacacaaacaagaatgacttttctataacttactccaaggaaactttatcttcagatgggccttaggtttatttcaacaatcccaggctgttgtacatataaaatgagaaaattatgtaaaagacagtgacaacaacactaaataaaaatatagcacgctgaaagaggaaaataaagcactttttttaaataaggaggaagagtacattaataaacagatgattttgaattcaatcaaattaaagttattatatttcagaaattkcattgtcacatttctgcaggagcacatactatgaaaaggaatagtcacatattttcatgctttttctgttgaatttacctgttcattcttcacatcccaaaataaaagggcaaatttacaaaacaattatcctgtaaaattaaaaaaatgcttctaaagaactagtatggttaataaaatctcttaaaaaattatacagataactagggtctcgcctggatatacacctgacaccataaactacatgatctgctccataccacaatgcaccaatggaaattctttttgcgccacctcagtttcccaccctagttgtttcagtgctgtagttcaaaagaatgggacaattcttttatcattgcttgttgcctacagtgagacaccatagggaagatgaccactgaacacagtcatttaataatattttccttttctattgtctatcttcctacaaattctatgagccatattaaaataatgaatgatatacaggtataacaaatcgctccttatttatctcaaaagaggttctagtagttgtgaaaattaaatatggcatttcgaatatatatgaaaaatatttgttaattgtaacattatataaactatttaaaatgcatgcaaaatttgttgaaaattattatgatctgtggatgttcaataatgtatcttgtcatttaataggtttgaatataagcatttttagtctcaaaacagcttttcacactgcgttttagaaagattttctggaaaatattacccatgtgaattatgatatgtattatttagtattataagtaaacatttatattttctttacatttaaattactacaaatttcaggtatgaaagtacacagatgagacttaaattccttgaaagtacctatttaaatagcttattattattattatttatttattttttgagacagggtcttgcactatcacccaggctagagtgcagtggcacaatcttggctcactgcaacctctgccaaccgggttcaagtgattctcctgccttaggctcctgagtagctgggattacaggcacccaccaccacacccagctagtttttgcatttttagtagagacagggtttcaccatgttggccagcctggtcttgaactcctgacctcaagtgatccactgacctcagcctcccaaagtgctgggattacaggcgtgagccaccatgcctggcctttaatagcttttaataggaaattaagacagtctggakttttgctgaatatgtagcatcgatgataggatttgttgcaaagtcttttgcttaataggmtactaaacactgaaaaagacaataattaggtaattcaagaacttagtattaacataaaacattatcaaatatatgttttcataacctctaggattacttaatattgtatgctccttaaatgggcaaaagctattcctctctttataatacaaaatttcatgttatttcttgatctatatttaatatttaccatcacattaaaaacatcttactgactaaaattattcagttagttaaaaatcttacaggttactctacatccaaacatatgccacacaaaagctcctgacgtctgttcattttattcattccacatgtatttttctaacacttcatatgtggtaggcactacacaattcatcacctttgyttatgtctaacattttatggtgttataaaaattaataaaaatgatagtctactagaaaacaattggaaatatctaagcaattagtaaaataaagatcattcacacaggaggaagttccaaaacttttgcaagtatatgaagaaaaccccagattcattagtcattagaaagtgcaaattgaagccataatatattacctaactgtcatcatattgggacatatttgaaaaccataaaatgctatgtgttgattggaatgtgggattggtgaccttgagtgactataaatagataaaacaaccccttatttacaatttattaacatgtaattattttaatgagaatgcacatgagtgcaactgttctggaaggcaatctggcagaatgtagttaaattaagcatatgcatactctatcacctaaaaattctttgtgggtatgtatttgtgaggaggtggaggtatcaagagaaataggcattgagagcattgagagtgctgtgaacgctcacgatgaaaatacttggcagaggctggaagaaacagaccataccaggtgttaacaccagaaggtggatccatcctgaagtctttgccaagttaaaaacaagtgagaaacaggatctgacctatagggcaatgttatttatgttgatttaaataacacgcgcacaaaataaatcattacatattttatgaataaataccaagcatctcataaattataatagttgttcacagaagggagagcagaatgggaaaataagatagaggaaaatgaatgtgttaataaatgaataaagaaatgaaaaaaatgcaggagcagaccttgaaaaaaaacaaaggcccaaacctaatttaaaaatgtgtagtataaattatttgtaatttgtttgctatcttttccatactaagattattaatcacgactataggttaattttccaaatttgaacaatcactctcaggagtcttctataaagcgctagcagcagcagcaaaagatcagctgaacatggccatctcccctggcggactcaacagcaaacacatcttgcaagtggggttcaatacaattgtccaaatcaattatactcattgctcattcattttaatgttaggcagtgttaatgtatgagaaagacatagatagagaagtggattttattttttaaatttatatatttttcatattttacaattttgatctatttatatattaacataaaagggggaaaggtaagaaggatggaagaaaggaaagaagaaggatcaaagaaaggaaggagtaaaaagaaaggaaggggggaatctttggtaaaggaaaaaactagtatttgaatagtgtcctgcttatttacagaacaaggagatacactcagtcataataagagatttaaactagggtatattttcctgagtatatttattttgaaatatacaataaactatttgtaatggttaatattgagtgtcaacttgattggattgaaggatgcagtattgttcctgggtgtgtctgtgagggtgttgccaaatcagattaacattttagtcaatgagctgggagaggctgacccaccctcagtctgggtgggtaccagctaatcagctgccagtgtggctagaataaagcaggcagaagaagctggaaagagccgacctgctgagtcttccggccttcatctttctctagtgatggatgcttcctgccctagaacatcagactccaagttctttagcttttggactcttggatgtacaccagtggtttgccagggactcttgggcctttgggcactgctggcttcctacttktgaggttttgggattcgggctgatccactactggtttccttgctcctcaacttgcagatggcctatcatgcgactttatattgtgatcgtgagtcaattctccttaataaactccctttcatatatacatatatcctattagtgctatctctctagagaaccctgactaatccactgttgttaagtatattcactctactgtgctattgaacactggatcttatttattctctccaactgtatttttgtacccattaaccaacctcttttcatgcctcacttaaaatccttcccagcctttggcaaccatcattttattctccatctgtatgagatcaacatttttagctcctacatatggagtgagaacaygcaatattttattttctatgactggcttatttcatctaacataatgacctccaattccagccctgttgctgcaaatgatgagatctcattcctttttatggctgaatagaattccatggtgtatacaggtacaatctctttacccatttataaaattttgaagttgaaaagtgttgtgttgaagagctaatctcataataatattgatattttttaaattattattgctattatttttattttttgtactcatggttcaaacaaaacttaaaatagagcttcaatatacaaaatatataaaaatgggcctactttcatcaaagcaggctcaatctgccttctagcctcctcaccattctccagatcctattctatgggtacccttagacacactctgtttccctgatgtacatgagttgtgagtttaaaataacataacaacctgaataagggcataagaacaattgctattaactaggacactgtttcttgagatgtactggaaggaaggtactctgaatttccgtttattgaaaatgaaatcttaattggtttaaaaactataatttttttaaacccaataactataggaataaggctttcaaatagagctctgtgtaatatttaccattaaaaattaaaatttgcctatctctcaataaacagaatacacactatttttatatagataaatattttctttatcagaaatatggtttatgagccaccttgctgttggtagctgactgttgacatgttcttttcaccctaattgaattgtgttcacatgtagtttggttatttactagttgttgtgcccttgagcaagttggttaatcctccttcatccttgactccctcaaggggattatacttgctaggtgactgctctagttttatttccatcctatgatagagaatacaatatgacagaatgggaaacacaaaacagctgcttgtttacaacttgtaaatatgcattttttgagctgaaggtttatataagaaatttaaaaaatactttaggatcctaaaacttccattttgttcttaattattttccttatctatagctgttcttgacatatacagtaaaacttccccaagcatagaaatcatgtcatctaatttttcttttttgcacttcccacatctcctctcatggccctctcagtggcagttgtccaggttctttggctttgtctttgctcccctgggtgccaatggtgtcccccttactgagtttcttttctctcggcattgttacattgttatatttgtaacatttggattggttaactctgcatgggacatccaatctgcagtctgaatctaaatttggtttaaatctacatgccaagcagacaaatatttatcattaatgccactaacccaaagttgatttaaatgcaaaataccaaaattttactccatcatacacttaaaaaacatgtgatacgtcataatcttatctcttcataatataaagataatataattttaaactcattaaaaattttaatgcaaattttataaatgaatattctttcaaattttagtagtattaaatatacatacacaggagatttgcagtatcatcctactcttttgctttaagtcactgtatttttatattgaatataaaatgaatgaaacagattgttatgcaaacttatatgctatgataatatactctgtttccatttttgggcaggactgttgacaagaattctttagataaatgttatacagcatggatatctttttaaatcgctcagagttagagaaggtaaattctgtatttgaaactctcattgatttgggatgtgatcttggacaatttactttccatgtactttctttcactctcaaattttgtgaagaacaagcaattaaaattagcaaagtgtggcttgcatatataaactccaaaatgaaataaatttacatatttttaaaacttttcatcacattttgaataaaagaaatttaagaaataccaaagactacagttgaatggtctgagctgactggtatttcttttctaggtctgagtacattgaaagtatttagagtcaatgacttctttactcacatatctaaaatagatttagctccaatcacaaaaaagtataattgtaaaataaacagattcttacttatatcacagtattaatagttaacaataaaaatattgttcaaaaggatttcatcgtcaaatgtgttgtaaaagctcaagtcacaaccattttttaggctaatgttatatagtaagcaagatacttataagtactgtagttttaatctgttatactatatatttaaaaagtgacacctaagaggtgatataacttgtctaatatcccacagaatggtagtacagaaatatgaaccccaaccatctcctaggccaatgcatgtatcagtaaataaaaaaactaattcaacttatgccaactaagcctacatgctagcctacctgaaggcaaactatgttcaaatatgtgaaacttagcaaaaataacatatattatttgtaatgccatttaaattgcaacataatatgataatttggaaattttattaattgcctacatgctgatattatttggaggcttggacatgcaaaaactgaagacattattgaacgaagagaaagttgctgtgggatatatcacttatggtgagtaaacagtgacagaaatgaataaaatttgattgggtctcttatcccttttccccatctcactcccagaagagaagacaatgtcgtatttctccagggagattgatgaaaaattatgctgaatcttactgggaagaaaaataatgtaagaaggatgaaagaataggaggtgcagattcagtgctagggaggaaatggtggttggaggttccaaaggaagtagggaccagcatcctgcttgtttatattgcctatggaagatgtctggcatattttttcaataaaaattgccaagaggtgcctttagaaagttgaacactagattctgtgactctcaatgtaggcaaaactactcttgtgaaaacttgggcacagttaagggagctactcattatcaggaaagtgtgctagctttgacattgcactcttagtggcgtggactgatgtacagaggcccaaactccagtgttctagaatgtgtaataccctcactgggaagttcctcaaggcatgtggtgcaggaaacaccaaatgatgaatgcaattcaatttcctaccaacagatgaaagaaagattggacttgattacatttgatttacagaaaaagtaatatttcttatactcaaatatgactgttgcaaagatatgctttttaaacatacttagtgtgaataagggaatacaattagccatgatttgtggaccaacctgttagaagattatcatgataagattcgatttctaatcaccgtgaccactaaaacaatccagtccagtatttccttgaaggattggtatagatgccaaaagccactttatggctacagttcattgtatgtctcattctatgtgttatttggaacagactgaatcagaaagtggctgaatgaggcagaataagggatatgagtatattagtataatttgattggcccctagaaaataatgttacatggggagttatccaataatagatatgtaatgtcatcatctcacttgaagtagattgcagtttataagtttataacttcttcctagtttaatatcacaatttatttgttagaatgctcagaatggatgttttttactaactttctaataaaatgatattaacagattaatactggtctgctgtggtttgaacgcctcctcaaaaactcatgttgcaatttaattgccaatgttatggtattggggggtgggtagggcctttaagagatgatgaggccaagccctaatggatggattaatgccattatttcaggagtgggttagttatcccaaaagtgagttccagatacaaaggatgagttcaacctgatttccttactctctctgtgttgtatgcttacttgaaagagcatgcctcttcactattttatgacacagcaagaaggtcctctcaagatgccagcactgtgatcttagacttatcagcctgaagaactttaagaaatgaatttcttttctttataaattactcagtctctgctattctctcatagtagcagaaaacagactaaaatgctatcaaatcttatgaataccataatcatttaacaataacaaactaaaccaatactatatggattgtgtagaaatccacaattaattgaatggacttaggaagctagggtagttgatgcacttaggaatgagaaatgcttgccttaactgttgcctcctctgctttaagtattcttactgaattattaataatttaacttcagttatgttgataacctttatgatattcatatattctgtactgttcttttttaactgttacttaaatgtatcttactactcagatgatagattttaacataaaatatcactttatactaggaaagtgtctcctaacaaatataaatgctatctgaactagtggcaaaatcatcatcactgccaccaccatctccactgtacatagatataaggacaatataaatttcattttataacataatttgacagataaaatacccagaagtttgcatagattactgaggtataactttaaagcatgtgtaaaatgagataaaatggaaatcatgtttctgaaaaagaaagttagaagaaagaaatctctcaatcaaaatttaagagtaaaaggaaaattcaaatatattcatcctatagtataagaaaataaaatgtttcttttgacaaaggaggagagaggttttatcacaacccaaatattaaaagtatgcttcacaagaaataatacaacatggtcaattgttatgtataaaaatgttaattaaagattaatattttaattgaagaggaagaaatacttccaaactcattgtataaggccagtattaccctgataccaaggccagacaaggatgctacaaaggaaaattacagaccattatccctgatgaacatagatgcaaaacttctcaataaaatactaacatactgaattcaacagcgcattaaaatgatcatccaccatgatcaagtgggatttatcattgggatgcaacaaggtttcaacatatggaagtcaatacacgtgctacacattaaaaaaatgaagaacaaaaagcatatgatcatctcaataaatgtagaaaaagcatttgacaaaattcaacatcctctcatgacaaaaaactctcaacaaattgtgtatacaaggaatatacctcaaaatgttaaagtccatgtatgacaaatctgcaactaatatcatactcaatgaagaaaagttgaaagtttttctctaagatgttggtatccattctcactaattccatcaacatagtactggaagtcctacccagagcattgggaaagaaaaagaaagaaaatacatctatactggagaagaaaaggttaaaattgtctatttgcagatgacacgatgttatatatggaaaacagtcaagactccaccaaaatactgttataattaataaacaaattcagtaaagttacaggatataaaatcaacaacaaaaatcagcctatactatactcagcttatactatgcacttctaaacactgacaaactatctgaaaaagaaattttgaaatatcatatatgatagctacaaaaagaaactatttgggaataaatttagccaagaaggtgaaaaatctatgcactgaaaatgataatactgatgaaagaaactaaaaaagacacaaataatagaaaaaatactatgcgcctatggatcagaagactcaatattgttaaaatgtccatactaaccaaagtgatctgcagattaaatgcaatccctaccaaaatttcaatgtaatttttcatagaaatagaaaaaaatcttgaaattcatgtggaaccacaagagatatggtgtctatggggtgaggcttggctcctctgaaaaggcagggaagagtgggaaggattgcgtttggttgtttgagggccagctcagctgcaatacaatagaacaccaggtagacttctaagatttttgactctggttcctgactcctggatggcacttctggacccacctggggcctggtggacctcaccaccctgaagggaaagacaggcctggctggctttgccacctgctaattgtagagttccagggctgtgagtgaacataggcaatagacaggaagtggttatagcaggccttgggcaagatccagtgctgtgctgactttaggtcttacccagtgtagtcacagtgatgttgcccacaggggtgcttgtgtcactcaacccccagctttaggtggctcagaacagagagagacagacgttatgtttgggagaaagtaagagaagagaacaagagtctctgtctggtaatccagagaattctcccagatcttgtgctacaccaccaaggttgtacctttacaagtctgccagaaccacagcattactgggcttggggtgccccctaaagcagacatagcttagaccataacaccaagtcatttgaaatatctggaaagccttcccaaaaggacagttacaaataagcccagacagtaaagactacagtaaatacctaagggtcttcaatgcccagacaggaaaacatgacctcacctaatgaactaaataaggcaccaagaaacaatcctggagaaacaaagatatgtgaccttttagacaaagaattcaaaatatttgtgttgaggaaatgctaagaaactcaagaacacagagaaggaattcagaattctattagataaatttaatagagtatgaaataactaaaaggaatcaagcagaaattctggaggtgaaaaatgcaatagatgcaactgaataatgcatcagaggtctttaatagaagaattgatcaagcaaaagaaaggattagtgagcttgaatacaggctattttaacgtacaccaagaagacaaaaaaagagagaattttaaaaataaagcacacctacaggatctaggaaacgcctcaaaagggcaaatctaatagttattggccttaaagaggaagtagaggaagagattggggtagaaagtttattcaaagggataatgacagagaatgtcccaaacctagagaaatatatcaatatccaagaacaagaaggttttagagggccaagcagatttaacccaaagacaactacctaaaggcatttaataatcaaactcccaaaggtcaaggataaagcagcaagagaaaaaaaaataacatacaatacagctccaatacatctggtagcagacttttcagtggaaaccttacgggccagggagagtgatatgacttatttaaaatgctgaagaaaaaaatcttttacgttagaatagtatgtctggtaaaaatacccttcaaacatgaaggagaaataaatacttaacccagacaaaaaaaagctgagggatttcaataccagagctgtcctacaagagatgctaaagggggtacacttcaatcacaaagaaaaggacagtaatgagcaataaataatcacctgatggtccaaaattcattggtaatagtatgtacacagagaaacacatattattataacgctgtaactgtagtttgtaaactactcttatcctaggtagaagattaaatgatgaaccaatcaaaaataataactacaacaacttttcaagacatagcataataagatataaatagaaacaacaaaaagttaaaaagtggggggatgaaattaaggcatagagtttttattagttttctttttgcttgtttgtttatgcaaatagtgttaagttattatcaggttaaaataatgggttataagatagtatttgcaagcctcaaggtaacctcaaaccaaaaagcatatgatatatacgcaaaaaataaaaagcaaaaactaaattatatcactagagaaaatcatcttcactagaggaaaacaggaaggaaagaaaggaggaagagaagaccagaaaataaacaacaaaatggcaggagtaggctctaacttatcagtaataacattgaatgtaaatggactaaacacttcgatcaaaagatatagagtggctgaatgggtgaataaacaagacccattgttctgttgcctacaagaaatacacttaacctgtaaagacacacatagactgaaaataaagggagggatgaagatatttcatgccaatgtaaaccaaaaatgggaacctagaaattaataacaggaggaattttggaaactattcaagtacatggagttattacacttagaaaaagtagattccaagacaaaagctataagaagagacaaagaagttcactatataatgataaagaggtcaattcagcaagagaatataacaattgtaaatatatatgcacccaacactggattacccagatatgtaagggaaatattgttagagctaaagagagaggtaggctccattacaataatagctggagacttcaaaaccccattttcagcagaaaatcagacaaagaaacatgagacttaatctacactatagaccaaatggatccaatagatatttatagaacatttcagccaagagctgcggaatacacattcttttcctcagcacatggatcattctcaaggatagaccacatgttaggtcacaaaacaagttttaaaacattcaaataatggaaatcaccaagtattttctcttactacaatgaaataaatctagaaataaccagaggaattttggaaagtattcaaatatacagaaattaaacaatatgctcctgaatgaccagtggatcaataaagaaatttagaaattgtaaaatttcttgaaacaaacgataatggaaacacatactaaaacccatgcaaaagcagtactgagagggaagtttatagctataagtgtctaaatcaaaaagagaaaaaagttgaaatgaaaaatctaatgacgcatcttaaagaactagaaaagcaagagcaaaccaaaccccaaattagtagaagaaaacaaataataaagaacagagtggaaataaatgaaatcaaaatgataaaaatacaaaagctcaacaaaaccaaaaattggttttttgaaacagatatatgaaaaggtgcttaacatcattgatcatcagagaaatgaaaatcaaaactacaacaaaatataatttcaccccagttaaaatggcttatgtccaaaagacaggcaataacaaatgctgatgaggatgtggagaaaagagaacccttgttcactgttggtgggaatgtaaattgctacagtcaatatgcagaagagtttggaggttcctcacaaaactaaacattgatttatcatatgaacccacaatcctactgctgggtatatatccaaaagaagggaaatcagtttattgaggagatatctgcactcctatatttattgctacactgtttacaacagctaagaattggaagcaaccagagcaagactctgcctcaaaaaaaaaaaaaaaaaaaaagaattggaagcaacctaactgtccatcaacagatgaatgaataaagaaaaggtgacatatacacaatggggtactattcagccataaaaaagaacaagatccagtcatttgtaacaacatggatggaactggagatcatcatgttatgtgaaataagccaggcacagaagacaaacatcgcatgttctcgattatttgtgggatctaaaaatcaaaactattgaactcatggatatagagagtagaaggatggttactagaggttggaaatagtagtagggagttggagggaaggtggggatggttaaagggtacaaaaaatagaataaataagacctgctattcgatggcacaatagtgtgactatagtcaataataacttaattgtacatttcaaaataacctaatgagtataaatgtattgtttgtaactcaaaggataaatgcttgagggcatggataccctattctccatgatgtgtttgtttatctttgcatgcctgtatgaaaacatctcatgtacctcataaatatatatacctactatttatccaaaaaattaaaaattaaaaagttatactttgcttactttgcttatattggagtcaattatactacatgattattatgaatgatataatcaaaattaaaagggtaaagttgatgcacaatttctttcataattagaagtgtcaaaagatgtaaataacatagagaagtcagttcaaacaacaaaaatatcagtaacaattttatcatcctgagagaatcttcaaagaaataaaattatgtgtcaagttatttcataaaaagtgcaaatattctgttctttatatcacaatgaagaattagcaaataattcactttgacttggtagatgtttaataaataacataaaaaatcaaatgtcatttgatccctgaattccatttgaaaagttatcaatctctttaataaatagaattcaatttcaaatgttatcaatgttagagtgtatacaatatcctgcaataattgattttccattgaaaaataagaattgactaagaagaaaacagtttaacagcaatttctgccaactgaatagaataaaacttaactatgttccctccagctttctaatattcatgtagagaaattctttctctaattgtaaataggattacaactgtaaaagtaatggcaatatagttctatatgaattatagagggttttcatatgtataccatctgattggtggttatttcagttaaaaggagtaaaatttaacccatttcacttgtggtaataccttcggtattaataaggagcaccaatacaggactcacacaaaaaagttattttgcccattttttttctcattttatcttcacagcaatccagtaaaatagatagggtaagcaaatccccattttcacaataaaacccccatagttttagaaaccacatttggtggcagtttgaaaagccaggtctcctcattcctcatctaagttattttggtattataaaggtttttttaatttttaagttatacagaatatctaattataaacttctggctattttatagctaatatcttagatgtaagtgcataatcagtataaataaatatattgaattacaataaaacatcacatcaagtccacaaatatttagtcagtaagtgccaaagagaatactaaattctgggccacttatatcaattagttataatttctgacatgattactcctactatggagtaggaacatcatgaacaaatgctcacagaaggcaaataacatcatggatctgggatcagagtggggctggtgggtgtatagatgggaggtgagaatggataaagatgagtttgtatagctggaatgtgttgtggaaggcttacagctaaaattttatttggacttaattaattttctaatattaagacataaaaggaaaggtttataataattagatcattattttaaaaacatcttgccatttggagaggatgtatgcatttctcctccaacttcagcaggttagtttcagtttcttttgtgttttctctgtttcttgtacacacttctgttatcctcaaaacgttatactttaatttattcagttatgtaattgcctctattttgacaatggagacactagtgaatgacaatttgctgaatgaatgaatggataaaatcagagagactggaagcccggagaatggttaagatttaaaaaaaataagacaggaattcaaaattgcaattgattattaattcttacatgaaataaaattttcagaaaatattgtcatgatgaaaaaataggactgctgagaatcagttcttggaatcaatatagtacttaaattcattttttccacagtttattaatgcaaactgtctaagcactctaaartattgagagattttattcacctttgttctcataaataaagtgatattgatacagccataattttcttaaataaagaagtattacagaatgattttccttcataaacattaaaactgtggctcttggctgccttttgtcctactgagatgcaaattacaaatgatagaaataaaaaaaaaaattgaactgccacctgtagaaccacacaaatgccgggcatggcggcttacacctggagtcccagcactttgggaggccaaggtgggcagatcacctgagatcaggagttcgagaccagcctgaccaacatggtgaaaccccgcatctactaaaaatacaaaaagtagccaggcatggtggccagcgactgtaatcccagctactcaggaggctgaggcaggagaatcacytgaaccagggaggcagacagtgcagtgagctgagatcgcgccattgcactccagcctgggcgacagagcaagatgccgtctcagaaaaaacaaacaaacaaacaaacaaaaaacmcacaaatatacatttatatggtatatttcctactaaaatatatggatttattgtgttaatttaaaataagatgcaagacttagatacaaaatactctgttggcttgctgtattatgcagggatttaagtttttaaaaaatggtgaagggattttggcttataaatatgaatacctaataaatgaatgaacatattgagatcattttcattaactaaattaaatacacatattgtgttgatacatatgtatatctattatacatatatataactatttcttaacacctccctgttcccaccttggtcttaacttacataggttcttaccaactctccttgcttctactctttacctctttaaaactattcttaatacagcagtaagagtgatcctatttaaacgtcattcagcttatgtcaggtcaattgcgtctcatctcacataagtacacgttaaagtccttacaatggcctgcaagatttgacccctgctacttttggtatccgctctttcacgtgttcactcagtttcagccacgttggcttcctttctgtcttgctgttcttggcacacaacaagcatgctcttgctcaggatatttgtgtccttgtcacttctctgcctataatgcaagacaactcccagatcattctttcccctccttggtggctttactgaatttttgcctacttgccaaagctttctcttaccacctcacctcaaattgcaaccacatcctcctacgtgccatacccaccctccttgctatatttttctccttagcgtttattatcgtctaatatatgatacttaatatattatatgagatatatttaacatttatatatgatattaatatttgttataatctgtcttagctattagaatgtaagacccatgctttcttcactgaagccctcacatgtccaagaagagaaattactttatacaatatgtactaaaaaaaactttgaaaaaatgaatgaataaataatggcattcagcaaactcaagtgctgtggctgacagtgactacgatttggggaatgagtagagtgtaaaaggaaacaaaagtagcttaagagaaaaataaaggaatcttattttccttcactactctcaatgaaattttatacacacacacacacacacacacacacacacacacacacacacccctttaatatgaatttcttgaggactgaagtaaaaacctgcattcttgtaggctattgtttccacttcggcacttatcattgtatctggaatagtactccataactatgctgaactattaaaaattaattaaaataaatgagaaccttaaaagatctgtatagttcctggacagtgtcttgccctcaggagcttatagtctgctcttagaaactacctgaaggttagttggaattctttcgagtgggggaaaaatctgtaagctccatttagtcatggtgttggttctaatgcaagcagagtcaaccaatgtattctgcatttctttatttctgtattttctttcaatgaaactaaaagaatacatatatcaaaattaaaaggaagacaaacatcattaattttaaaaaaagagttttggtccaggtgcagcggctcaggcctttaatcccagaactttgggaggctgatgcaggaggatcgtttgagcacagaaggtcaaggctagcctgggcaacatggcaacactcctgtctctacaaaaaatttaaaagaattagcatatgtggtagtgcatgcctttttactacttacaatattctaagcatgacattatgtttcctatatcttattcctaaatttgataacaattttgccaactattatcccwgttatccagctaagaacacctgggtactaaaagttttaaaaaatccaggcaataagtaccagatctgaatttaaatcctgatctaactctaaaagcatggctgtctacaaaccactggagatactaaagcattggctggtggaagatctggtatggatattaaaaagagaggttagcatccttgcttccaaagtaaccactccaagcttacgaaaaagtgcagtctattccaagaaatattggttagacaaatccggaaatctaactgtaggaacaattgttccttatgaagcaatatcactgaacacagaaatacctcaaagtatgtcaaccttgatgaaggcaatcaaattaggatttggggcattgtaccacataaaacaggacattatttagtttccttcatgtccctatcacaaagattataatgtaagcataattctcctctgataaatttcaaaataaatggataaagaagagaaatatgtttctttgtactggcaatgtatctaatcactagtatcgtgatgtggtgtgatatcactacatcttgaaaataatatattagaacctatcagcccagggaccagtaatttgtatttttcttcacagaagagagtttcctaaatatatattagaaaatcttcatatcaacatgawatgtggtctgtgtcatgtgtacctaacgcaccagctttaaggaattttgagaaatctcatgctaatgaccaatccgtacctggtaatccccctggaacaagaacaaggaagctcactcatctgtgtgctgtgtttcttgatctccaaccttgatcactgccatgccatctgtaacatatgccaaaaaagcataagcagaaatagagactttcttgcctaggagcattcttccttatgttatgctggagtgcgtcctctgtcctctagtaatgctactggaattagctcttctaccaaagactttttcatgacaaggaattccagaggccaacttctaaaatcaaaaccaccactccaaaaacagctaatttcatccttacttcaatccctgattctcagcattacatccaacagcattttcttgccagaaaccctgtcagttcatctttaagaagaagagcaagctagctggaccaatttcactcacctactctgaaacaactaaaaactaagaatataaaagtatgcatgaactataattcatgtcacagaggcatttcctcacagaatacctatggacaaacaatgaagtttctctcatttcattacaagtcttatggccttggacgtgcttacttgccatgtagctctggctaaatctataagcaaacataggatatcactggttttagctttgtgctcttccatgctgtgttaccactgattcattaagaatgttcttgaagacacattcagattttaatgttatatttctatcttagctccaaagagttttacaaaaattttctaaatttatcaattataataatatagatacaagttatcttcaaaagattttattaaattaacaaagttgaacaacttatcaatataaacaattgttttaggttcattggatatatgatatttagtccttgtggattcattgttctcttacaaaaattgctgaagttttaaaagtatcacgatggtaatgtatttcacaattatgttataacacagacaactaggatgaaaattaatttggagaactagttcaaaaaatccagtgattaaataaagcttagaaccaatgatatgtatataaaagtttagatttagtccatgatattaaccaagtaaaattgattttatctatattttctactctaccttttctggagatataatattggcataaattgataaaaccatataatattgttaataagtttaacaattgctatggataattgttttaatgtcctaactcttgttattgtattaattcagaatacaatgactaagtctctaagtagagcaaaaacctgcattgtgaacttattgaagactcaactggacatgattatatgtctaatttttttccaaattaatcagtctcttcaatgaaattactatcaaatctcaacagagattgtcatgaaaattgaaaaacagattccagaatttatatgcaaaaccaaagggtcaagaattgttccgagagcatcctgacaaacggctctaggatggatccacctacgaaatgccaggatttaatataaagatgttacaattaaaacagtgtgatatcggtgtagggatagaaaaatagaccagaacagagaacctggaaaagatctgtgcatgccttttaaaacttaatatatgacagatgggactagcagatcagtgtgagtaataatacactattcaaaaaatggtgcacagtagtagtaaagaaaaataagaaagcaatcctatttaaaacagctacagtataatgaaatacctaagaataaatttaactaaataaatgaaagatctttacaatggaaactataaaacatgaaatatcttttcattcttatgtgtcctcttcaattttttcaatggataaaaaatagaaaggacacataaaaaatggaaagatatttcatgttcatggattgaaaaaattaatattgttaaatgtccacactatgcaaaatgatctgcagattcaatgcaatctctatcaaaatatcaatcaatgtcattcttcacagaaatacaaaaaaatttctaatagttgagtggaaccacaaaaggccctgaatagacaaagcaatcttaagtgaaaagaacaaagctggaggcatcacactgcctggcttcaaaatatactacaatggtatactaaccaaaagagcatggcatggcataaaaatagacacatagactaatggaacagaatacagaacccagaaataagtacatgcatttacagccaacacagtttcaacaaaggcacaaagaatatacgctggcaaaaggatagtctttttaagaaatggtgctgacaaaactggatattcatatgcagaagattaaaattagagcattatctcttacatatcaaaataaactctaaatgaactaaagacttaaatttaagacctgagcttatgaaactactagaagaaaaacattaaaagaatactccaggacattggtatgggcaaaaatgttttgagtaagacctcaaaagcacaagcaacaaaagcaaaatttgacaaatgggattacgtcaacctaaaaagcttctgcatggcaaaggaaacaatcaacaaagtgaagagacaacctacagaatgggagaaaatatttgcaaactatccatctgacaagggatgaataggtagaatgtataaggaactcaaacaacttaatagcaaaaaaaaccccaaataatttgatttaaaaaatgagcaaaagatctgaatatacatttctcaaaagaagacatacaaatggccaacagatacattaaaatgctcaatatcactagtcatcagggaaatccaaattaaaaccacartgagatttcacctcaccccattaaaaatggctcttttcaaaatagagatgctggcaaggagatgagaatagcagatgctggcaaagacttgaagaaagagaaatgctcatacactgtttgtggccatgtaaattagtccaaccactat

SEQ ID NO: 3 - DNA, 95000 bp, Homo sapiens
tcacccaaactgaaccactcaccgggtcaactgggctgcaagcccttatgagttggagacaagtggcccagccccaacacagtcagacaaatcgctgggcggccatctgctcctgagaccgttgctagagaaacaagacaacatccaagttctccasatcatggttttccgggcgccagccaaggcgctccgggggcgtggttacgtgggcgacgcacggagggggcgggtcagaaacaaccgggcggaggcgcaccccagggcgcatgcgtgctgtgcggcgcggtctcagggaaggtggggctatggcagctgctagggaccctccggaagtatcgctgcgagaagccacccagcgaaaattgcggaggttttccgagctaagaggtaccagagaaggcaccggagttctcctgggcaatgcagagggagggtgcttttacgtgccaggaggtttgctggactgtcacttcccgtttacttctcatctgyaggcctatgacgctccccaggagtagctagctaataatccttttgagttttttattcttttcactgtccctgcttgacatgcttgttgcttactttattcttagtagtatagatattaaaaatgagggcggaggaagaagaagaaaatcttactagtgaagttatgcattgattagctcattaataaaagttgctttaaataaatctaaaagatacgaagcacagtattttgaactttatgagtagatgccagccccctatctacttcacgctttacattacgttcatctacttctgtaatgtaaccgtttgttgagggagtaacagaacatggaggaattatggattaaaaattaaaaggaagaaatttgttatcaaaaaattggctatgacacttaatccctgtacacctgtctaataaaagtgattatatttgtgttgcagtgactgcttaaaaaatactgggactaattcttggataacagtaaaactttcaggactattagattctagctgacaagttctgtttgttaactaattaaaatgctaaatcattttgtttatcaataaagagattccaactgtctactaaaagtgcacactgtcttttaaagatgtcatcagagagttgggaccttctgttatccagaattttatgttatattctaacagcctatgtaagtttgcatggttcatcttaaagtaatagaaaataaagtacccacatttataaacagcaacattgagggaagggatctttgggttgtgtctttcttagtcacctaacaccaagtgtccstgatacataagaattgatttgcaaagctggagatttgtttatgtttatctcctcttcttattgaagaattgaggcaatagtctttggcaagttaaaagtcgctctcttaatcaagaaacattatgtcattcagaatttataattaaattggattgcaaaccataaaaggagggagtgatctaaaagaaaaaaaaggaacttgtgaacagtcttcattataactattttgaatcgtattaatgcaccactaattattccctaactttcaaaagccaaagatacattttggaagatgataatggatattaccttctttatcatctttctcaataggcaaacctgtggcaactagaaaattctgataatttttgttttcatttccttgctttttccaaataggcaaacttgtagcacgtggagaattctgggacatagttgcaataacagcggctgatgaaaaacaggaacttgcttacaaccaacagctgtcagaaaagctgaaaagaaaggagttaccccttggagttcaatatcacgtttttgtrgatcctgctggagccaaaattggtacgcgctttatggtcagttttataatataggtcctaagcagaataatcattgaagaaaaggtttctgtgacttacagtgtataagctgcatatctctacccacagctttacaaactttaaaatttgaacataaattgactttttttagaaagataaaaggaatagcaactgttcttacccattatgacttaccttgaaaaacttccagaatgttacttaaaagawaattttattagttttaatgaaattcacactattcagataggaatactcctttggaccttatcagtagaacccttgaggtcctctccactccagagttcctccagcaatttacatgaagaaagcaattagtgggaaaaaatactcttgacctcttagggacataatgcagaatgcaaaagaacactgtcacatggcttaaatataatacatatatttgaaaaccctagtttaggtcaactttgccctttgaccgtccattgcaaatagaaataaatgctgtttttctgaatgctcttttctatgtgatacttaaagttgaagccccctgataccagagataagatatctgtatatgacattaatatgacattagcattattctaattagccaacattattttaatccttacaactatgaggtcagtactgttattatttctttttttttttttttttttttttttgagaaggagtcttgctctgttgcccaggctggagtgcagtggtgcgatcttagctcactccaagctcygcctcccaggttcaggccattctcctgcctcagcctcccgagtagctgggactacaggtgactgccaccagcctggctaattttgtttttgtattttttagtagagacggggtttcaccatgttagccaggacggtctgtatctcctgacctcgtgatccacctgcctcggcctcccaaagtgctgggattacaggcgtgatattatttccatagatgagaatctgaggtactcaagagttaagtaactggcccaagataactagtgtggtagttatatttaagatttttttttgggaatccaagttctaaaaatcttttttcgaaaggaactctaacttgtgtttttgattgtgtcatttgggagaattatttaaatgggctttgtgatttgtaactctgtatgaatgtttatatttatcagtcttctagtgttacagattgtgtaattgattcttctttcttataattactattttggggagaatattacctcatcatttattactgagggttgttgtctgggtttcattgctaatttattgattggttgtttgctatgagatgtttttaattttgttctattgccaatacctttgatgtccatctatttacttattcctgaaaggcaaatccttaaggttatataacacctaaatttactgtcatgacaaagttttagtaggtttctattaaataaattgtgcttttttaactttgtttttaaggaaatggaggatcaacactttgtgcccttcaatgtttggaaaagctatatggagataaatggaattcttttaccatcttattaattcactctggtaatgttatactttactaatttacattttctttttagtcttccacctttaatactttagagacttttttctttcttgcaaacactttccttcttttttaaaagaatctttgaagttattctgctttgaaaacaaatattttatgattttcatgactttttttaggttgtaagtagtatagtgattttcacaaattttactcgtaaaattgtagatcacgtatatcgtcagtcttttatgaatattgttttgttttgggtatgtatatagaaaattattttcctaagacaactcattcaaatatgaatagttctcgggaatactttaatggggatttttcttttaattttaatttgtattttaagttccagggtccatgtgcaggtttgttacataggtaaacgtgtgccatggttggttgctgcacctgtcaacccatcacctaggtattaagccagcatgcattagctatttttcctaacactctttctcccttaatggggattcttgctttgagggaagggtggtttaacactgtcattactagacttttgccagtactttttatcttgcatttttgtgtgattattgrtagccagaggccacaatgcttaaaaataaaaggaaaatgtgacaagatacagagtggacaagtaaatatataaaagagaaatcacacacacaaaataagacattttaaaacagaaaagtaggaaggacatggtctcagaatraagaatagctttttaaattgaatacatttagttgtgtgaaaattttggttacatgaaaacctttgttgtttttctatgtatgttaaggggctaatgaaaactgtcatgaactgacaccagtccagggacaggtattttagaattattcatctacatggcttccaaggcactttttcattcttatgatttacatacaaaacaatgattctttgtaaagatgatgtcaaagtaaagcatccaagttctggtttgaagcctaaaaatgtgtaaaamaatctaatttacaattttatttaagaaaataattattatcagtttagtaaaaattaaattagataccaggaaatgcatagttagataatttttttatttttattttttggaaatagataattcttagtgctaaacttgactattggctgctctttgaaaaaagaaaaaaacagaaacttattagctctcttttgttgaacaatgtactgtgtgctgccaagtgctttacaggtattattgatcttcagtaataaattaaccttagcttactataacatttttactttataaacttcttaatttttttgactctcttgtaataacattcagcttaaaacacaaacactgtacagctgtacaaaaatattttctttatattgttagggtttattttgttgtttttatttttactttttaaatattttggttagaaatgaagacacaaacatattagcttaggcctacactgggtcaggatcatcagtatcactacctctatagtcctactaaagttcaggagctgtcatctcctatgataacaatgctgccttctgaaagacctcctgaaggacctgcctgaggccattttatgcttaacttttttttgtatgtatcatatgaatttattctaaaataacaatgaaaagtatagtatagtaaatacataaaccagtaaaatagtcatttattaccaattattatatactatatacataattgtatgttctgtagtttagtaaactggcagcacagcaggtttgtttataccagcatcaccacttgagtggtgcatcrtgctaggactttacaatggctccaacatcactaggtgataggaatttttcagttccattatgatcttatgggacaacctatgtatatgctgtccataattgagygaaatgttgtaaagaagcaagtattttagcattagtatattagttttctataacttttattttctgtgaagtagatttttttttttttttgagatggagtctggctctgtcgcccaggctggagtgcagtggcacgatctccgctcactgctgcaagcttcgcctcccgggttcacgccattttcctgcctcagcctccagagtagctgggaccacaggcgcccgccaccacgcccagctaattttttgtatttttagtagagatggggtttcaccgtgttagccaggatggtctggatctcctgayctcgtgatctgcctgcctcggcctcccaaagtgttggtattacaggcttgagccaccgcgcctggccttctgtgaagtagattcttaattagaagtctaaacatggttgaaatttgttgtttaaaatgtagatacaggctgggtgtggtggctcacgcctgtaatcccagcactttgggaggccgagttgggtgaatcacctgaggtcaggagtttgagaccagcctggccaacatggtgaaacttcgtctctactaaaaatacaaaaattagccaggcgtggtggcaggtgcctgtaatcccagctactcgggaggctgaggcaggagaatcgcttgaacctgggacacggaggttgtggtgagccaagatcgcacgtcactgcactccagcctgggtgacagtaagacttcatctcaaaaaaaaaaaaacaaatgtagatgcaacatcatgttttgggccgtggtccttcttatttgttatacatgtaattcaaaacatttcacagattctacagtatatttaaattttttcctgacctacagtttttaaaattgtcttatatcaaatggcaacaagaaaatttctcttcgaatttttaatttggatttcattattctttcctgatttgcagtaacaagtggcatatattaaatatcgttaaatatattttgatttgtaacttatgggttataaaaccctggggttttgaaaattttataaataatactgcatttttaaatggttatttcgttttaattttataggtggctacagtcaacgacttccaaatgcaagtgctctgggaaaaattttcactgctttacctcttggtaaccccatttatcagatgctagaattaaaactagccatgtacattgatttccccttaaatatgaatcctggaattctggttacctgtgcagatgatattgaactttatagtattggagaatttgagtttattaggtttgacaaacctggctttactgctttagctcatccttctagtttgacgataggtaccacacatggagtatttgtcttagatccttttgatgatttaaaacatagagaccttgaatacaggtcttgccatcgtttccttcataagcccagcatagaaaagatgtatcagtttaatgctgtgtgtagacctggaaatttttgtcaacaggactttgctgggggtgacattgccgatcttaaattagactctgactatgtctacacagatagcctattttatatggatcataaatcagcaaaaatgttacttgctttttatgaaaaaataggcacactgagctgtgaaatagatgcctatggtgactttctgcaggctttgggacctggagcaactgtggagtacaccagaaacacatcaaatgtcattaaagaagagtcagagttggtagaaatgaggcagagaatatttcatcttcttaaaggaacatcactaaatgttgttgttcttaataactccaaattttatcacattggaacaaccgaagaatatttgttttactttacctcagataacagtttaaagtcagagctcggcttacagtccataacttttagtatctttccagatataccagaatgctctggcaaaacatcctgtatcattcaaagcatactggattcaagatgttctgtggcacctggctcagttgtggagtattccagattggggcctgatgtttcagttggggaaaactgcattattagtggttcttacatcctaacaaaagctgccctccccgcacattcttttgtatgttccttaagcttaaagatgaatagatgcttaaagtatgcaactatggcatttggagtgcaagacaacttgaaaaagagtgtgaaaacattgtcagatataaagttacttcaattctttggagtctgtttcctgtcatgcttagatgtttggaatcttaaagttacagaggaactgttctctggtaacaagacatgtctgagtttgtggactgcacgcattttcccagtttgttcttctttgagtgactcagttataacatccctaaagatgttaaatgctgttaagaacaagtcagcattcagcctgaatagctataagttgctgtccattgaagaaatgcttatctacaaagatgtagaagatatgataacttacagggaacaaatttttctagaaatcagtttaaaaagcagtttgatgtagagrtattttaaatattgtacactttgcctttttgagtaacattccagagataggtattttttgtaggctgtttcactgaactcagttaatgaaaactgtattaacataattgttgtagcataatattaatagtgcaaaagtacatataagtcattttgatgaaaaatattccaagactaagttgagaaaagagatactattttggatgtgtatcagtatttttgtttttaataatgattgatttgtggagcattgttttttcacataattagttttaaaggtaattttctaagcatacctttggaatttttccatcttttttgaggcttttggtccagtgaagttctaagtattcactggcacttctctcctcaactgtaattctatttttaataataaaaatggcatactgtagggtcttcagagtagtgtaggaatactgtagaaatactttttcagaaacgaatccatagctgacaaattcactcagtgcccaatatattgtgattattttcgttgataaagaactagatacaaagacctctgaaattgatgataaaatttgtatctcattaattttatcaaaatgaaactaaaagtacatatgtattatacacttgaacatgtgtttgtatatctttaaaattttcctttatgttccattccataggaaaacacacatatgcacacaaaactcagttatctgtggggaaagtggtagtaataattgagattcatcaataatcatataatttcactatagacattacttgcattatctcctatcagtccttctaacaaaacttcaattaccagatgaactgactttagttttcatcttattttttgtccacatgctggtgatgctgagaaacaataattggcccaaatgcagacatcaagaagcaggcaggaaaatggaaaaactgagataatacacaggtgataaacagtttcragaaaataaaaattggctagaatctcaagttatgtgtttctatattggtataagcatataagtgaaaagtcttataagtgtaatagagaaaagatttgtcagtgtgtttttttaaatgaaataactagtctgtgctactttatgtcaatataaaaattggtaaacwagaagtaacttgtccacaaccctcagttatgatacttatgtgcgtgtttttttttccaaagtttttcccaaggagaagatacaaatatatggtagctattgtttaaaaatgattgatttacttgcagatttttcagaggatgttatgtctttgtcattcattaaatgttcaaaattgtagttttaccaaatctgaagtgccatcagttataagaatcaccattattttatgttccattaagaaaaacacaataaaacatgacactgctttttttgttacttgaaattttcatatttattggagagctcttttagatgtttttaaatacagatttttatttaaccctcttgcatatacatataaaataacaaaaaaataaaatattgagatatcatcaagaaatttctacagcttcacattcaaactcttcagcactttcagagctattgatatgcatatgtccacctagtaccatcttctctgctttcagaattattggtaaggctgcatttcctgagtgctctaccacacttatgtctggattttttttacccagctacagacccacactcctgcaagatttgatacccttctatttggcaaaactcagtttcacttttctttcagtttaatcacaggtccttagaagatcggacctgtgattctattcaaagtcagaaagagatttctcacaaattgaygtcatattaacatgtcaatatgaaaattaattgtttggtaaaccagaagtgacctgtctgaagccctcaattgtggtatttgtgtgtttgttttttctttttcaagattctttttaaagaaaatatatggtagctgttgtttaacatttatctacttacagagcgttcagaggatgttatatgtttattaagtgctcaatactgtattttaacctaatctgaattttaatcataatcctgyacaatgcatggattctggttgctttgaaatggttctgttcaaaggacttatcaatgtctcttgctttgagatgtattgcttggtgtgtagtagcacaaacgtaccaccaataatgtacctaattcaactgaagtgacagtcatatacgcagatatgaccaagttcacatgtgagcaagtaacaactccatgactrttgctgcctggctaatagctaytatactatcatttgtaaggcacattctgttttctggggtgtcgaaatgtggataaaaaaagatgaattaggaatgattctaacctaagtatgtgttttaataaaaggatctaggcaaaaaaaaaaaaagtaagtcactcctaaatttaatccctgaataatgcagtgtacatgatgatagaggagaagtgtgtttttgataagaagtgactaaattttgtgacaatcttaattttttaggcttttcatttagtcttccaataaagataatttttttctgagttttatcagcagtagaaaaataagacctacatggataagtttgaaattaaacattttgtctcattttataatttttatttttatgaaatcatggcrcttacatcatatactcaggtgtgtaaaagcctgctatttgtaactataatccataaacttattgatgatttaataactatcaacaagggcatgggaaaaattcaacatttgataataatcttttaccttaggcatttattctctaagcaaagcagaaataaaggatatgtatcagtgtatactgattgaaataaagctttaaaaatccaagtgatactctgaaattgtcaaaagtttaatggcatgaatccaggattaattcccataacctgtgatgatctagtcatcttctgtagctacatagtactcctaatgttaagattaccaaattcagcaataaagccaaaatcaaaactgccttctgtcacatatagctgttaagtaaactacacaaaakcagagttgctgtttacatacatcatgatgccgtctggacttgagcaccttggcggctcaggattaaggcacctcagtctagcctagcagagttacaatggagagaagtgaaaactcattagtagctcaaaacaagctaaaggatttcagatgctctttttcttgttcatctaaatcaagtcttcatctgtgtcaagaactaaattgttaaagacctttttaatttgcttagtgcaagaaaaataatagcaaccatatatctagttaacttgagtcttctgtgcctctaaaattttgtttagagaaagcctatttctattgaggttgaggaacacaattctaatacttagtaaaattattaacattcattgcatttaactttgtcgtattttccttcctccaatactagtgtgccaaattctgtaacatagtagcatttttcatgctcccatttatctgtatatacagaaacttctgcttaggtttttttttatatataaagaaagtctagtcataccagtttggttgaagaatactaattctgtccctggaagagctgtctacgtgagccacaacaaaccaaacttgccacatcattcaaacttgccaatttggccgtagtttagtagatgacaactttgggtcaggttaatatttggggaaatggaataataaaagctgctgattttcctactgtattgctacttggaggattggaggtgtagagggaagatgcctgtaaatgagtcactgttatcacctacctgcacatcagcttgattgttgacacttatgtctaaagatgttcatcccragagtattattgtgcatgcaagtaactgattgatactaacgagttaacattttattttgggctgcttggacaaaaagtcttatctttttgaagcctctggctgcagggatctcttagccgttgcacatataaatttcaaccattcacacagagcaattcatttctgattgctgtagactagtgcaatccatctgctagtgtcatttcctagctatctgtgccagaattacactccttcaattgtgcttcagtgcatttctgaaacaatctaaactaaaatgtctgtattctttggccactggcttatgatgtgttactgatatgcttgttgaatctccagcctctttaacactttttaaaatctttgttacaaccaacacatcatagctaagtaatctgcacatgtaaatgatttttttaaatttcttttcttaccagtatccactgttttctctctgtagcacattcagatggttcaagtgagttttaatttaccacttccttgtaggagagtgtcacatcgcccagaatagaattaaagcatttacatcttgaggcaaaaaaatcttttaaaatacaactatgtagaaatcaagtaagtgttcatttcatttgcaggtttagaaatgttgcactgcttaatgaagttttacgtgagtggtttcttacctattatttttagccttggggtttgagaaagtaaattatgtccatcaattttctgtactttagagaagtttcaaatatttctagaactagaaaacttgggactacacaaagaaataattatgattatatcaggtggcccaagtgcagattttaaatgtacaggcacactgacaaagtcataaattaaaaatgcactaattatatatcactgggatcaatctttaatgaattgaataagaaagatcacttatgactggttaaagttgatagagcttctaattaagcattatccagtcaaataaagagctgtgtatggaagccagcctatgaggaaggaaggaaaaagttttagagtaattcttttttacttgttgcaacagctgattcttcaatacaaaagaaatatttactttgatttgcatttctctgatggccagtgatggtgagcattttttcatgtttttttggctgcataaatgtcttcttttgagaagtgtctgttcatgtccttcgcccactttttgatggggttgtttgtttttttcttgtaaatttgtttgagttcattgtagattctggatattagcccttcgtcagatgagtaggttgcgaaaattttctcccattttgtaggttgcctgttcactctgatggtagtttcttttgctgtgcagaagctctttaattagatcccatttgtcaattttggcttttgttgccattgcttttggtgttttagacatgaagtccttgcccatgcctatgtcctgaatggtaatgcctaggttttcttctagggtttttatggttttaggtctagcgtttaagtctttagtccatcttgaattaatttttgtataaggtgtaaggaagggatccagtttcagctttctacatgtggctagccagttagaggatgtggagaaataggaacacttttacaccgttggtgggactgtaaactaattcaaccattgtggaagtcagtgtggcaattcctcagggatctagaactagaaataccatttgacccagccatcccattactgggtatatacccaaaggactataaatcatgctgctataaagacacatgcacacgtacgtttattggggctctattcacaatagcaaagacttggaaccaacccaaatgtccaacaatgataggctggattaagaaaatgtggcacatatacaccatggaatactatgcagccataaaaaatgatgagttcacgtcctttgtagggacatggatgaaattggaaatcatcattctcagtaaactatcacaagaacaaaaaaccaaacactgcatattctcactcataggtgggaactgaacaatgagaacacatggacacaggaaggggaacatcacactctggggactgttgtggggtggggggaggggggagggttagcattaggagatatacctaatgctaaatgacgagttaatgggtaaagcacaccagcatggcacatgtatacatatgtaactaacctgcacgttgtgcacatgtaccctaaaacttaaagtataataataataaaataaaaaaattaaatatttaccatgagttcagtgagaagaagcaatttacaaaattagccatgtttctagtgtctttgagtatgtatctctaagactacaaacgtgctggaattttccataacataaaaataaacaaaaacaaaaaacaatacttctcttagccatattatttcatcaggaatagtcagcctagtttcatctacaatgaaaccgaagttttactagccatcatacccaacactgaattctagattcagatatgtacctccctgcttcgtatccctcccttactggaaaaaaatacataggcatctctatttggagagctctaatcttctatcaattaaggtaatctttttcatctagataaatgacacagccattcaccaaattgctcaaggaacaaaccaggaaattttccatgactcttcaggtacttcccctcatccttttcatcctgttttcaacaagtgaagtctatgtatgaaaaacacaaccaaaatccatcaacctctctcaacttgttgagctaccactgttttctagactaatggaatagttttttttttttttttacatcccacaatgccttattgtgtgcagtaataacaatgatmtgacttttataattgcacatgaacgcaaagttgcagaaagcctgcaaaggaragatttagaagattggcattggggtgtatgaggcattgaaagaaaaaggaatactgtggccatctcaaccttacttcactaatttggtactgtttttgtatcccattttgctcccctgaagactaccttttaggacaaagattcatactactttctaacattctacactttattttctccatgaagttttgcctggtgatagtctgcaatctctttaccacccacattgttgttttttacctttttcatatttgctatgtgtaatcagatgtcagctggaaatctgctttccctttagatgtaggcaacattagttgagcctctattctaaaccccagagatgatgtcaaaaacttctctcaaatatctgtgaaattcctgaagatcatatatctccataattgctttggactgtaagcttccatttctggtgagttagttctgtttgggcttgcatgtgattttctcacaattctatgagctgagcgcctatttttcactatgtgagtctcaaacttttcctctttcctgcaattagggcatcaccatatcctctccagaaaaaggccttctcacacaaattttgtgtgtagcaaatttctctgaatcattggagctagggaggaagktgctggaaggaaagagaaggatacatatcagagcacagcattaagtaataattgttcttagaaatcctttggcatcttcatctccaagactttcttcactagctattttttttataatccaaaattatgtctaactttttttctcttcctcagaccaacttcttccatccccttacgagatatgcacacgttgtttacattgtagacatatagcatttatctcttctttctcttgtgtcattagttttcttccttcaatgaattattctcatcagtacactaatattctgtgatttttccagtttaaaaaaaaaaaacccttcactacacttccttcaggtattactttatttccttgttccttttacactaaaatttttagaatacattgtctgtttttccattcttcagttcccgtcttcctatttactcttcaacccaattcaggcttttagcacccctctccattaccactactccattaaacttgttctgaagatttccagtgctctcgactttgctaaatccaggggtcattcttggtctcatcttcttgccctttaaacagcatttatctcaattgattacttctttgacttgcattctttacctggatgcaaggaaccccacattactggttctttttctaactttctggtcacactttttaagtctctttaactgatttctcctcatcttcctcacctcatatcactagaaggtcacagatatttgtrtttgaatttctctatccacattcactcctttggaataccatccattttcatagcatctatgtgttatcaattctcaaatctgtatttctcattatcaaaatgtaactctcaaattgttaaaatatgaatccataaattgtgaacatgggtcagaatttaatcagtgaggaagccagcaggattatgaagttgatttttatattgttccrgatgctacaaggaagaaaatttatatacaacattataaagaattttttccaataacagagtacattttcttatgagataataggcttaaaagacaatttagcaagagttttctcaagaagttcttattttagataagaggtaggattgaggcaggaaaatagggcctggaggcagggaacgtaaggccaattcacacttaagctatgacaggaaatatccttttcatagggtgtatgcagagtaaataactttgtaactttacttcttcctctccatttacatatggcatacaccaagtaaccagtggaaatctctagagggtatttaaacccccacaaattctgtaacggtgtccttgagcccctatgctcaggcccaytcccacactgtagagtgtactttcattttgaataaagttcttcattctttctttgctttgtgtgttttgtccagttctttgttcaaaatgccaagaacctggtcactctccaccagtaacaggattagataatgactgtgggttggatttcctgaaaaccagaatctgagatgtactttagaatgcaaaatatttttaaggagggcctgtgggattaatacttgtacaaggaaggggagagagcaaaacagagtagaagaaagtgaagctgagatgcaatcccaaagacagccttaattggctaatcccaagaggagctctggatattagaatagcacttcagtgtttcccaagttgaacctgattggccaggatttataccacacatcaattatcttttctcaggtgcccaattgataaggaagacaatggacaagatatctctttaggaataagccaatctgtgaaagggggctgaccaatgaaagctgtctactgacagcacttgcagtagctgaggtaacaagcccttcactgaagaagcaatatgggtgccatcacagtgtccaccacaataacattataaagtccactcaattccaagattcaatttctatatgtaactattttaatgaaacattgttatgttttaattcaagttgaattatgacttccaaactaatcatgcaatattgtacatattttaagtgtacccaatccaagaagaaactatactttagtagatatgtcaatcattgatttacagaagctttttttttgtaatactgtcacaaatctacatgataatccctagtgccagattttacttttgactagctgagcaagctaaaatattcataaattcacatgaagccagatggcttcccactgaatatgcatttgaatgattcctgtacattatttattccaagaagtgcacaaaatataccatcgtcatagtagagattcytaataagtttgtttcaaaaaggagtcaaggaataacaggtgtccagtgctaactatattttggactgaaccatgattctatgtatatttgagaattactaacagcagattcaatatagttagtttctattagtctctgaaatatcaggaatctgaaataaggaaggttcagcaagaatgactagcattttggaaaaaagaggatttaatgtggctagcataatttcttaataatttgcttagttctctaaaatattcaaatgtacaacacaaagtattaaccatttttgtcaagtctatcagtatgtttttaggggtacttttttcaggttaaaataacagatgtgaatttgaaatgaaaatataacttaatcattaaaagctttttctccaacatatttggggagagaataaatgaaaatagtatttttttcttttttaattcatagagttttcctttcatttaaatctgctgtgtccctttttaaagtttcctgttctctggacatctgtcatcattgctgtccccaccttccatcttctgtttttttccttcaaatgtggtaatcaatgttgttttgtaaaacaaatctaacaattctactatctgaagtcaggatggatatgcttctgatccttcttcagtgttttgttgctatgctttcatgtgtatctgattgactttgtttgttggtcattgtccttagcaaagtatttgcagaggtttcccatggcctaagatgaatggactctcctgtrgaggctttgcatttgcttctatcaggagaccagagaagcattgccacttaagagcaacctcagattaagttcaagagtgagcttttctgacttagaaggctctgtataaatccaaagtgaatatttttgtagcaataattgctcaggaaccttattttactttcttctcttttttcctttcttcttctttttttaaatttcttctgctctgcttaacagcaaggcaagctgcttgacaattctttggtttgggataaaggaggacatatttacttctagctgatwcttatmcaaaggcatatttttgggaggctttagattattagggtgtcaaagacaccctctaagaatttccgacctgaggaaacacttggctaccctctggttccttagaacctaagtttaaatgtgtgcttttggaaaattcctcagggcagaaacttactccatacgacctacatttcttatacaaagaaatatccacttatatctctgtgtttaagcattttcctgaaatggtttgtgtatacaactttatggtttttagttcctcattgttttttgcgattatgacttttatacttagcatttaaaatcagtccattattctcacttatgtgaaacataactctagttctgtattatcttattgacttattatccaacattttcactagtgatatattttagttagtagagggtatggtatgttagtgggggggatagtactagtagatgatatatttttataatgaatgttacagtcatggaatgtaatgattatgaaaatgctaaacatatgaagaaaaaatgaggaataaagtaaatatttatacccttatcccttttatcccccatcccataagccacatgacggagtagacagctcagcacctagcatgatgctgctatgagatgataaaccatgttaaatcttttacagagcaggtcagaataaacataagcagacaaaagtatgttaaatgtatactttttgaaataggaaataagcctacaaaatttgctttaaaaaagttaccatttatagtagatagaacacatagaccagtgttagaccccctctgacttcaaattatcacaatttgaagttaattatgtgccaggatatttgatcagcactaagaatattttatcccttgctctcagggttcttccagtttagttgaggataagataggaaaaaaaataattgcaataattcctaggtagagctaccataagtaaggcatttgaatagtcagccaaagagactaacaaaagctacatgatgaggaaagatctcttagtttggtacgcgagagtgctcggtgcatarcaaagtctgaaagaaacccagtcaaagtgtagtgtgtcacttcagaaatcacatggaagtgtaagagtggcttgggaaaaggtctacacttgattaatttatagtattttatataaatatgcagataatttcatatttatataaatacacaggtaccttagaaattaaacctctgaccaaattatgattaacaatttatttcaaagaagaggaaagaagagagaaagtcgtatgtgtttatgtgtgtgtatgtaatatgggagtgatattcccagtatttggctaccaaatgacaaaattgagtttagacattgatgaatagtaatgaataaggaaacaaataataataataattaatgtcttcccacagatcacttcctaataaaacactgtaaattaaaggatatggtaatttatgtgatagctttgcttaacgataagcagcacttattgaactgtgtagaactgaaacaaaagagaactggaaaagagaaacttcacaaatgaattaacatagtacaaatattgtacagcagtttatttactttgaacctgaaaaaatttaattagatttcaaaaccttataaaaaccttattttatrttctcgttaaaacacatatttcttggaaatgattttgtttagacatgagtaggtacttttgtctttacaaaagtttatccttatctgtgctgagctaaaaattcagtatacagctggtgttttgattgatacagtatagaagtgacaccacatattattatatcagtctgatttaaagagctgaaagaaggtgtttatggagtaaactacactgcataaacttttttttcatggctcttagtagaaaaataacaacagcaacgaccaaaatatgtacacaaatgcacattttatatttcatagtcagacattaactaaaccaataaaacaatcttcaaagatttttattgcataaaaacaaaatataactttctagttaagcattaagctcaacaaaggaaatgtataaaaatgaaaaaacattttagctttgttcctagcactgctattaactcaccgtgatattcattaaaccaaaagtcaaatatatgaacagcaagggccactgggcattgcaagtctgaaatggtgtgctagaaagtgttttgaaatttaaaggaaaagaaaaaaaaaaaccttcccgacaggtgaaaataagcctcctattcagttatgatatctaagaaaatttaatggaattattaaaggagcacttacagaatatgtgcaattactttctttagatgggacaaatatatttcataactgatttcttcatttccaagaacagttttatttctttgatctttctttcatgataatgaggtagatgtgtacaggattgaacattacatttcaaatgtaatcccaacagacttgcaacaagcaaattttttatgttattctttataaaatgatacctctgtttaaaccactcactttcttcaacatactatgaattcatatataatttgtgtatttctcccacttacagaacactggcttataccactcttcaggtacttctctcctccaataattatattgtgtttttgtggggttttttttttttagcttttctaagttcttttggtttgattacatgtttctttttgtaactctttttatcttttctgttcatagtttctaccattgctgctactttatataatttctctgtcatttgatatttatgactttgcctaatttagcctcatcaatttttagtccccaaaaaaaatccaagatgaaatttaaattactttggtcccatcaattttgtttaatttgtttactgtgtaaaacaataatagagattttaatgaacatcatcttaataagttttctagttctctgatgtgatataatctaaattgtgtccagactcttgattyatcatattttagatattaaattgttatttattttcccactgtctaagatttttaaaaatctacaagtagcaagacttattgcaaatcatgccagattcaaaaatccttctgtactactagcccgattaaccctttcttcctctttcatagcatgtggaagttttttttttttttttttgatactcatcaaaagctactttgtaaaataagttagttagatttttgaatatcaaattaggttgtaagctctgtaagcaagggccctgccttatacttccttatagacaagctgtgtcaaaccactttttggagttttattttatttctaattcaaggacctaacctcagcagattctgatttagttgatcacgagtaggttcttgtaattgtagtttgtaaaatctccctgaaagtctggtttgtaagttattgctagaacatcaaatcccttgtataaattactaatgctagcaactccaactaatgcaaaaacctcttaaggattacatatacaggaagatgaggaaaacaaagagactaatatttgtgtgaattttccttgcatagaatttcaaaagcctgtagtatttaggctgcagaattgcaatggcctactctagtttcactttacctcttttccgaccttagcaatattcctcttactgaaggaatgtattctaagcaattcaattggttcagtccctttcagttcagttcaattttattcagttcaattcattccaaaacaattaaatttatgtctatacttataaggaactgtggtgggctatttcaaatgcaaagatgcctgcattcaagttacttattgcctgggaggagggataaaagcattaattctatattctataataaatcccttaatagaagcagatgctgcatggatagcaacttagagtaggatttaaatgtgtttaatttcttgcctattcttaaactacatatatgtattgtatatatgtatatatatttatgtaatgtatacattgtattatatatagtatatatgcacacatataaaattatagtataaacttaccaaatataaatatgtttagtcttcaaaatgaaatagttactaacagccatcttcagtaacattaaaggatgcagccctgatagatcatctcaaggtgactttgtaaattagtacatgtccagactctgtagaagaaatgagttttatataataagtcaaagagagaatatatagtctttaggggacccgaacataactattgtagttcactaataggttaactgttatatagctgcaccgagcatcatgggcaatgagagtttcagaaagataatgatggagttaatttgtgaaaactctcatgtgataatatgcatttctctctcgttctgatatgcttaaggcctacacattttccaaatgccgtgttaccctttaccataggccctatcatttattctctggctgtatatatgaactagggaaatatgggtgataattttaggtaactatttgtgtactcagacctagacctcaacctgggaaactccggccagcagttaggaaatgataacacatggtgagccaacttaaacaaatagactcaagacttgtaatcaaatccagtatattctattatgatttaataaaccyaggcatcagaaacaccacagttagaattgtctttgcatcatttgctttggacctcaagagggggtgaccttaaattataaagttactggtacgggaagaatgagacccccggacaacacrgaggtgcttctaacacctttgcatgtacaatttccttatgtaattcagaacatgcctcttagtattgatgacaatttcatttttaaagtttctagcttgagcttaagtccattaattcacaatttttcttctccattagtgtgaacttcatgtgaccaaattatgggtttaagagacaaaaaagggtatgagatacaacgggagcagcaaggacaacatggccaaaatgttctgtgaagttggtaaagactcctcagaacagctgacattttgaagcaggaatatgactttcctggagataaaggcaagaatactagagcaatcactctccatattaccagacaaggaagtacaatttaggcttactagtagcaagaactcctaaaaatggctttctgtgaaaacaagtggtcttgaaattcataataattatagtctactcttgataatccatgttgaagaaggggagtacagttgtaaggaaaacatgaagtttttcacaaattgtaattaaaatgtaaatctttttgtatatacttagatactaaacttgaattctggttgggaagggtatattatttggatgccaataaaatgagatataaatctatgaggacatatgttgaattggaagcactcaacttgggtttattattaaaagtctgcctggcattaaggatgcactcaaatattacttgctataacaagtccctaaataattggcttcagagacaatagtctctgcaaaaagaaatcagaaatctgtgtgaccatacaaactgcaactttctattaattcaccaaatgaaatgtgttgatccactaatggggttatgaatgaaagctgagtttttttttttttttttaccccaacagcattatactaactcctagcactcctttaaattttatgcaagatgttaaagattatatatgtggaatttcaagtatgaaaagagccagtctagctccacaactaaatatacaatgtatagaaacaaaatacaattgaatcagagttagttcttattggtggagtgctgagcttgccaatacgatgaaggaagatcatgaacctttgcgtacacacaaattgctaatgctatttctgccactgttatagagaatggtgacaagggggttaaaaaacatagtacatgataactataatcaccattctggcattaagaagatataggagaagatgtaacaaaaataatggtaactacagacagagagcttactgagactttctctgcttggcgggaataagcaaagaactggtcctatggaatcactcatcatgctaactcaaagatcttacataaaccaagaggcatggtgcttagatratgctcttctgtctcagggccttcaactttttttttttgagacagggtttcgctcttgttgcccaggctggagtgcaatggcgcgatctcggttcaggcatggcatttcccttaaagttgaagaactaccaggaccgattttaattttaagtggccacagtgtagcagacacagcagcttcctgctttctctatcactggagtctgctgcagtaagcaacagggaattagtcactgagtcaacaagggggaaccacccaaacttgtttatttaattttgctacataatagctacatatctatggattctctaacaaccacattatatagtcccacttttcaaatctttaaataatttgtcctgcctatatcaaaatgtatttcttttcactttgaggaacagccacaggtagataattgacaagtgaaaagaaaactctcaaaaagaagaggaaagagtaaagaggacttggtcatccatcttcgataccagctcagtcacggtagaatatggcaccagtcagagtcatgaggtgccccttctaggctctagcttcaggacaacatttctaaacataccctgggccagaaacgaacctgctgccctgaagggaaggaccaagttttggcaggacccatcacctgctgactaaacagcctttgggccctgaataaccagcagtgatacttaggttgtatgctgtgcactttgggtgagactctgagacttgctggattcagatgagactcagcacttttccagctgtggtagctacagggagagacaccttctacttgagaaaagcagagagaaaataaaggggactttgtcttgcagcttaggtatcagctcagccacagtcaggaagagcaccaagctcttaaggtccctaattccaggccttggctcttggacagcgttttgagacctgccctgggctagaggtgagaccattgccctgaaagttgagtcccgggccaggtggcattcaccacaagctgacttaacagcccttgggtcttaaaggaacattggcagtagtctggctgtactcctcatgggccagtgatggtggtagtcactgtgtgacgttcctctgcctatggaaaggggagggaagagtggaaaagactgtgtctcattgtttgggtgccagctcagccaaagtgcaataaaacaccaggtagacttccaaggttttgactttagtacctggctccaagatggcacctctggacctgcacaggacctggagaatcttgccatcctgaaaagtaggacacaaacctgattggctttcccctcctcctgctgattatagagcccagagccttgagtgaacataggcggtagccaggtagaggttatagtggatcttgagtgagacccagtgtgaagccccagtggtggtggccacagggatgcttgtgtcatcccacttccagtttcagtcagctcaggacagagagaaagattttgttagtttgtgagaaagtaagggaagagaacaagagtctctgcctaaaaattcagagaattattccagatcttatccaagactatcaaggtaatacctccacaagtctccaacagttatagcattaataggcttggggtgcccctgaatacagatgtggcttagacaacaacacccaagtactttggaatacctggaaagtcttcccaagaagaacaaatacgaacaagcccagacagcaaagattacaataaacaccttactcttcaatgcccaaagatgaatatccacaaacatcaaggcttttcgggaaaacatgatgttgccaaatgaactaaataagacacgagtgaccaatcctgcagagacagagatatttaatttttcagagaatttaaagtagctgttttgaggaaactcaaagaaattcaagataacacagagaactcagaattcactcagagaaatttaacaaagagattgaaataattttttaaaaatcaagcagaaattatggagtttagaaatgcaattggcatatattgaagaatgcatgagagtcttaatagcagaactggtcaaacagaaaaaagaactaatgagcttaaagacaggctatttgaaaatacacagaggagacaaaagaataaaaaagaatgaagcatgcctacatgatctagaaaatagcctcaaaaggaaaaatctcggagttaatggccttaaagaggaggtagagaaggagctagatagtgataaaatatccaaagggatcataacagagaacttcccaaatctagagaaacacatcaatgtccaaatacaagaaatctatagaacaccaagcagatttaacccaaagaagactacctcaaggcatttaacaatcaaacacccaaagtcaaggataaagaaaaaaatcctaaaagcagcaagagaaaggaaacaaataacatataatggagctccagtacattggctgaagacttttcagtggaaaccttacaggtcaggagagagtggcataatatatttaaagttctgaagaaaaaaaaactgttaccgtagcatagtatatctggtgaaaatattcttcaaacttgaaggagaaatactttctcagacacactaaggctgaggaatttcatcaacaccagacctgtcctataataactgctaaaggaagtacttcaatccgaaataaaagggagttaacgagcagtaagaaatcatctgaaagtacaaaactcactggtaatagtaagtaaaaacacagaatattataacactctaactgtggtatgtaaaccactcaagtagaaagactaaaagacgagccaatcaaaaataactacaacaacaaatttttaagacatagatagtacattaagatataaatggaaacaacaaaaaattaaaagtgggggcacaagttaaggtgtagagtttttatttgttttctctatgcttatttgtttatgcaaagagtgttaagttgttatcagcttaaaataatgggttataagatagtatttgcaagcctcatggtaacctcacatcaaaaaacatgtggtagatacacaaaaaatagaaagcaagaaaacaaatcataccaccaaagaaaatcaccttcactgaaagggaggcaggaaggaagatagggagagaaaatcacagaacaactagaaaataaattaaaaaatagcaggaactaagtccctatttatcaataataatattgaatgtaaatgggataaactttcaaattaaaagacatagactggctgaatggatggaaaaaaagactcaataatctgttgcctacaagaaacatactttgtctataaagatacatataggctgaaaataaagggatgaaaaaagatattctatgccaatggaaaccaaaaaagagcatgagtagctatacttatatcagaaaaaaatagatttcaatacaaaagctaaaaaaagagtcaaagaagtcattacataatggtataggggtcaattcagcaagaggatataacaattctaaatatatatgcacccaacactggagcgctcaggtatataaaacaaactttgttagaagtaaagagagagataggccctaatacaataatagctggagacttcaacacccgacttttcagcactagatagatagtctagacaggaaatcaacaaagaaacattggactttgtctgcactatgcaccaaatagacgaaataggtatttacagaacatttcgtcaaatggctttggaatacacattttttccctcagcacttgggtcattctcaaggacagatcatatgttaggttacaaaacatgtcttgaaacattcacaaaaattgaaataatatcagggatcttctctggccacaatggaataaaactagaaatcaacatgagaaattctggaaactgtacaaacacaaggaaattaaacaatatgctcctgaatattcagtgggtcaatgtagaaattaagaaggaaattgaaatatttcttgaaacaaatgttagtggaaacaaaatataccaaaatctttgggatacagcgaaagcagaacaagaaggaagtttatagcgataagtgcctacatcagaaaagtagaaaaacttcaaatacacagcctaatgatacaccttaaagaactagagaagcaaaaccaagccaaacccaaaattaatagaaaagaaataataaagactagagcaagaaaaatgaatttgaaataaaatgtcaatgaaacaaaaagggtttttcttgaaaagataaacaaaatgtacaaacctttagccaggctaagaaaaaaagagaaatgatctaaataaaaaatgaaaaaggaaacaatacaactgttgtcacagaaattcagaggatcattattggctactatgagcaactatatgccaataaattggaaaatatagaagaagtgaatcaatttcaagacacatacaacctaccaaaatttaaccatgaggaaatccaaaacctaaacagacgaataacaagtaaagagaccaaagcaataataaaaagcacctcccagcaaagaaaagcctggactcaatggtttcattgcttaattctaccaaacattttaaaaaagaaataataccaatcctactctaactgtttggaataatggaaaaggaaggaatacttccaaacttattccatgaggctagtagtaccctgatactaaaaccaaagacctgtcaaaaaatgaaaactatatgccagtatcactgatgaatattgatgcaaaaaccttcaataaaatacgagcaatccaaattcaacaacacattgaaaaggtcaccatcatgaccaagtgggatttatcttagggatgcaagaatggttcaacatatgcaaatcaattaatgtactacattgtatcaaccaaattaagtacgaaaatcacatggacatttcaattggtgctgaaaaaccatttgctaaaattcaacatcttttcatgataaaaatcataaaactggatatggaagaaacatacttaaacacaataaaatccatctatgacaaatccatagctagtatcattgtaaatgataggctttcctctaagatgtggaacacaaggatgcccatttttcaccactgttattcaacatagcactggaactcctagctagagcaatcagagaagagggaaaaaaggacttcgaaattgaaaagaagcaagtcaaattatccttatttacacatgatatgatcttatatttggaaaaacctaaagactccacaagaaaacgacttgaattgataaatttagtaaagttgcaggatacaaaatgaacatacacaaaaatcagtagcatttctctatgccaacagcaaacaatctgaaaaagaaatcaagaaattaatccctcttatagtagctacaaataaaattaaatatctaggaattaatgaaaaaattgaaagacctctacaataaaaactaaaaaacattgatgaaggaaattgaagacacacaaaaatgaaaaaattgtccatgtttgtgaattgaaaaaattaatattgttaaaatgttcatactacccaaagcaatctacagactcaatgcaatccctatcaaaataccaatgacattattcagtgaaatagaaaaaaaaatttaaaatttatatggaaccacaaaagacccagagtagccaaagctatcctacgcaaaaagaacaaaactggaggaatcacactacttgactttaaattattctacagagctacagcatccaaaatggcatgatactggcataaaaacagacacatagatgaacggaacagaatagacaacccagaggtaaattcatacatctacaatgaactcatttttgacaaggatgccaagcacatacattgggaaaaggacagtgtcttcaataaatggtgctgggaaaactcggtatctatatgcagaagaaagaaactagacctctatctcttgccatatagaaaaattacatccaaatggattaaagacttaactacaagacctcaaagtatgacactactaaaataaaacattggggaaactctccaggacattgaactgggcaaagatttctcaagtagtatcccatgagcacaggcaaccaaagcagaaatggacagatgggatcacatcaagttaaagagttgctgcatagaaaagaaacaatcaacaatgtgaagacaacacacgaaatgggtgaaaatatttgcaaactacccgtctgatagggattcattaatatccagaattttataaagagctcagacaagtttacaggaaaaacatcaataatcttatttaaaaatgtgcaaaatatttgaaaagatatttctcagaagaagacatacaaatgacaaacaggcatatgaaaaggtgctcaacatcatttataatcaggaaaatgcaaatcaatactacaatgagatatcttctcacctcagttaaaatggcttatatcaaaaaggcaataacaaatgctggcaagaatgtgcagaaaagggaattcttgtacactgttagtatgaatgaaaatgaatacaaccactatggagaacagcttgtagtttcctcaaaaaaataaagattgagctatcatataatccagcaatcccactgctgaattacatatacaaaagaaaagaaataagtgtatcaaagagataacttcactcctatgtttgtggcatcattgttcacgatagctaagatttgaaagcaacctaagtgtccatcaatagatgaatggataaagaaaatgtggtacataaatgcaatggagtactactcagccataaaaaagaatgagatactgtaatttgcaacaacatagatggtattggaaatcattatgtgaagtgaaataagccacacacagaaagacaaattttgcatgttctcatttatttatgggagctaaaaataaaagcagttgaactcaaggagatagagaatacaagagtggctaccagaagctgggaagggtagcaggtggtggggttggggatggttaaggggtacaaaaaatagttcaaaagaacgaataagacctagtgtttgttagcacaacagggtgactacagtcaaaaataatttaattatacatttgaaaataactaaaagtttctaatttgattgtttgcaacaaaacagataaatgcttgatgggatggataccctatttgccctgatgtgcttattacgcactgtatgtctctatcaatatatctcatgtggcccttaaatatatatatatctgctatatacccacacaaattaaaattgaaaaattaaaaaaaagaaaataaaaattgagaaaagaaaaaaaaactctcaaataagtagaactattattttgttttccctccccccaattttttatgtttgtttattatacgatttagaaacctctaattagagaaacctctaatttttaaaacaaacaaacataaagttgattacattagattctaaataacatttttaaaaatgttatttgtccaaaacaataattagttattaattgaactataattatcacacaatatcatttttaagctggttaattaactcttaggatgggtgaagaaagaattaagaaggaacggaagtggcctgagtcatgaagtttagattattctgattattttaattcctcaaagaaactttttctgattgaaatttagcctttaatagatggactttctcatgccaatcatgtatatctcatcataggacaaatactgcattgcggttacctgtttactcatgcatctctggccccatgagctctgtggatttcttggtacaatacgtatttgttgaatggataaatggactgatcagttcgtaaattgagctagactgacaattcaaagaagtcatataaatttggaaaagaaattttagccagttacagaaatgtgactcttacctctatttaatctagattatttaatcaactttatttcatgtttacccaccaacaaaggaaatcacaggaaaaactatgatctttgcatttgctgttatactttattggacacagaaatagcaatattgtttattcctttttaaaatatactctgacagttaaagatactgagaacacatacttaaattactgtgacattatattatcatattataaatatatattcattataatgtattctcaagtcttactcatttttgaggattaatctgaatattacctcaacatgttcagactgatgatggtgatttatacatcatccaacatactaaaaacttagatattctagtgaaaaagaaagaaaattgtttgataaataagactcttacaaattatgcttgtttaaatgcagaaacacattatttaaaagaaaattaatcaaataattgtgtgcacttgaatagttgtatgcatcttaggcaatggtcaatttatttttaaaataattttatttcaacacaaattatttaatctttattaaaaataaaggaaaaaaacctaaatataaactaactagtaattccaccttcttatgtttaaagcaatgattaatttgtcaaccagatgcaacgcattgaaactctatgcttccccaaaacatggaaatatattaataaggactaatatacaatgaagaaattatcaaagtataaattaattcaacttctaaatgtgataataattgttccaagtgcattagtttgatttcatgggatacattttcttttatcatttctctgttggaaccataaaggtagaagtgtcaaggtcaatttttacgtttttcattttgaaagcatccttttaaatctttataaagaaatcagtataaaataaatataaatagcagatgcgtaagtgtagattgggataaataaatcgtataaaccccaaataaaataatgcagaaagaacataagtgggtttattgaaggagtattagaatataactatttgtatgcagaagtggtctgagaaatcagttgaaaagacagaggcattaaaactagatttaggcaattcagtagaatatcaaacttagttgaaacaaagtagttgaagaaataatatttcataaatgtgttctgacattttctaatgaagaaacgagcaagcataaaagaaagaaaccttactattaatcatgtatttgagttggcttttctttataaattattaaatttccttgagtacttcaaatgctctttttaaggaattattattttttgcatcatttgttttatatttttccataattttttaaattaatattttgttagaattgttttcagtttacaaaaaacatggatcagaaagtacagagttactatatactccccctacacacacacaatttttcttattaacatcttatatagtatatttgttaacatgaatgaaccaatattgataaatgatttttaactaaagtccatagtttacgttagtgttgtgtagttctatgatttttgccaaatggataatgtcatgtatccaccattagagtatcatacagaatatttctctactctaaagatttcctgtgcttcacctactcatctcttcctctcctctacccctgtaaccactgatctttttatggtttgtatagttttgccttttccaaaatgtcatatagttgaaatcacacaggatgtagccttatcagactggcttatttcacttagtgatatacatttaaagttcttccatgaattttcatggctcctttcttttcattgctgaataatcttccatattctggatataccacagtttgtctctccattcacttatgaaggaatatcttggttggttcaatttttgtgaatcacttttaaaatacgagactatacttgcatagccaaatcatgtattgccccaggaattaccacaggatagaactctttgataatctgaagtaatctttcttttgtttttattctacttatctcttttctcttgcatgaaattcaaaggtaaaaaaatttctgttaagtagcatctcactttaagcaaccttaaaatagtgcttcttaaatgatgctccaagtagcatctacattagaatcatcagagttgcttgttaaagttcagattcctgggctctactcttgatgtactgaatcagaatttctggggatggagcccaggtttctatttttttaaacaaagctcctcatgttgcctaccctcactaaactttgaaagcagactacttttgtaatcaagttgtgtttttgataatgtatgatataacatgctttctccacttttggacgtctcaggactggggaaagtaggattcaacttagagtatgtggccaactctttattagaaagaagtactttttacagaaatgtactgagtattagggaaaatattttttgattctatgttgtttctttccaacattctttggaaaaggaatgcaaggatattatcctggaccatttacatttccagcatttcttcatcaggctgaaggtacccagaaaaaattactctagtacctcaaaccattacctagatccacattcttaagaagggcttagagataaatattgtttctttcaaaccaggaaactgttatagttcaatagtggttaatattttgggtaatattttgagtaattttctgcatttcttatattgctatcgtttcattttatttccagcaaaatgtattgcattagaatgtgggagaattcaactgagttgctgaktggattttcaaactcatcgcagaaatcacacctttgaaagccaaagctttcatttgtaaaacctaggctttttaagagaataaaagtattcttgaaaatcaaaaggaaaaattctaaaaagcagtacatcagacttgtgtcccaagcaggaaattagaaacacagtggaagatgatgtaagagctaatttttcctccatatgtggaaaacatacatgtacacacacacacasggatggaagatccgagatattagaaataagaaaagagatcaagaaaaatatatttagttgtcctctagaaggctcccatctttgtccttctggattcagagtatagaaaccatgattattttaagaaactctgagaggagaaagagctggtgcattatttcctaaagtgtagccctgggagattgcaagtcttttaaagaaagctatccagtatggtcttcaagataaggaagaagagattaagcaggaaggtccctggacaaaacaaagactttccaaactgagaaaatgggggtcacagaagtgcttagagaaagctggtggaactgaagatgtctggttttcaaacaaggagaatgtagagtgtatggaccaaggtaaccagatgccactgcagtatagcaagtatcaacagctgtggtaggcatgtactgataagaagggaaaaggagaatatgtccagatgaggacaaaaagtgtctatgaagccagacacctgatgcgccaactatatctcatcagtctggaagccttacctctgaaacttctattacttttgctgagcaaaaatatatggtgartcctaactttgtctaatcatttattcaaaaagagagttgtttgaacatttaactatagaaaatatgaaatctgtatctgttaagttaaagctatatcctctggatgtgaatctgaagattaaaatttatactttctaggtataagaagattatctgaaataaatatatagtgaaaaatttaatgttttctttctgggtttcccatttattctccatcatagactgggttctttatatcagtagaaataggcatacaatatgcatacaaagagaaatgtcctaataaagtaaatggaaggtgcatgaaagagaaattctggaagacaaatcaataatatytagcttggatattagagtcacatggtcagaactgattccagacttccaacttactagtaactttgtgttttctcatccataatttgtgaataatatctacctagcagcactgtatgtatgagattaaataatgagatatatgtaaagcatgtaaactagggtctgacacatagcaaatgctcaattttcttattcttaatcttactgttcttgtcatttattattttacgaattgctatttgtagaacttaatgttttacattctgatctatgattcttatggtcggaataatccacaatagtataaatcttggtctatgttgagaatttcttcatacaaacataattatgtagctcttatacaggccaaacctgcattcatttctattagttatatgctagaggtaatgaatttttattatttatttatgtatgtagacacattctattaccactctttaccaactgccattattttggcttaggagaaaatgatcttgaaaacaggtctatgtagttttaacagctcttttgtgaacttcggatgtaactgaatcattttctagatttatctgttaaataaatggtccatgaaagtatgtatgggtagataattgatggaagcaaataatcctattgaaacatttgctatttatttttgatacagttcttttaaacagactgattagttccctttatgatttcaccctcgaaagcacacacgattttgttctttatcattgttgcatgacattccatttggcagttgggcttatttttagccagactatcaaagtatttttcaactggactgtcactgcacttgaacttggaatcttataacttgaagaactgccctggagaaaggaagaaacttataataaatgggaaattataaatctagaccaacccaaacttgtactggtaattattctaattattcttatttccttaagtgtaatatggttcaattatagttactgataactaacaactcattggaatatgtgttaatttgtatacggaagataaggcagcatgttttgtgaaagtctttgaaaaactatctgaactcaaattatttttttctgaagatctttataggaaacaagaaatttcttacaaaaatattattttagttccttggtataatgttacagaaaaaaatttggaatattgctgaatgtagggattttagaattatatcttaagtatctagtatttaaaaactaaaaaccgtcttgcaactagagattgctataattaaaatgcaataaaatcaaatgaaataagtcaaatatatttttctatgtaaatatattatccaatatcgaatgggttcttcattactacaattcaatatgattgcattttaaatataaacatctgcattttaaacwcacaatcagtaatttaaattaagtattgtagaatctagaataaaaaacagttttgattacttgtatgttatgatctgtgtctacattttgcaaaacacaactatgaatcaatctcatttgttcttctttactagatgaatggaagaaaaaagtcagtgaatcatatgttatcacaatagaaagattagaagatgacctgcagatcaaggaaaaagaactgacagaactaaggaatatatttgggtaaagttgtaagagtcattatttctttgtataagtgtcttcagtattcaccttawtttttaaagtatctgtatattttttaaacccgtagaacctcagacataagcagtcatgttctaagccttaggatgtcagattatctctctttgaccactcatatagctctcaaaatgcaaacataacatctcacctccttaaaatataaattgtaatctgccatcattaaagtttaaaaataaaaacctaaaggctagcctttgaatgcaagctattgttgatctcagtaatcttctcaggaattagatcattcttgtaaaccatgccggcaatgaaaagcaagatttttcttcccacatagtggtcgcatattggccacattgttctctttgaactatgacggtaagtccaattttaacaaaccctctggtctcttgacattgaaaggctgtcccttaatggaactgagtatcattctgcccctgaacaatcatataacaacatataatattgccttcaggatttcagtagattttgttccatgataacaagagaaaaataatctaagtgtcacaaccttggaagacacaaaatgttcagaaaagaggagcaagacccttatatacacaaaaagccttctggttaaattgaatctgacattgagaaactagatgcccattagagggtcaagaaagttacctgcctgactaaggaaaagttccatataggccaattagccatgttcatttatagctgtgttatgtaatgcactcatggcaaagaactccctctattttacttagaaaacaagtgtaaagcaatgaccaaatgacacatctttaaaataaaattttagatatagtaaacatataaatatcacataattggcaaataaaatcacccatgtataatatagtttatatgaaattcgtcaatggatgtaacaaggctttcacaagtgttcaacttatggttcaaaaagtagttggttctctttatagtttggcccaggatgatgaactcaacactgacacttgtgatgagataccactgatctgacttttgcaagtagtatcacatgttgagatatggaactacatttgaaattcctgtagaaatatgactggcatgttagtacagtagaattataaatatgtatttgttttgttggaaaagtatgaatatagaaattaatcataaacatctagctcttattgacttaaataaatatgctaaatgaaatatgattacattgaagagattttcctcaacttttaaaggtcaaagcctcagttatttagtattattttttaatttagaaagtattgagcacataggtgaaggctagcttaaactagatgtatccaaacctgaatattaggattaacaatggatttaaaatgtaggttctttctgataccacatcgacaactacaagctgttttgacaactgctataatggacttttcctgtgtttctactaaatgcaacaaatgtgaccttcttttttctgattagcattgggggtgagatgcaggaatctgtgtcagggagcttacagtccagaatttgttgagtgccagctcgtattcaagtgttgttctggatacatcaaatacaagacattatttaatctatagtcatatgtagattgttgtcatttcatgtgtgccgaataatattaactccggtggatgataaactaaggattagagacaaggcagtgggagttgtcaagtcacatggtcagtaaattctggaatgtgatttgtgtcaaggtctgcctgactccatagatagcgctcttcctaccataccctgcttacaaaaacaagatttaggtcctgatttattcattgatttttggaatcattgtagataaaaagcatagttaagtaaaggtgtgtaggcaagaatgaatgagtaccatagaaagtttaggaaaagtgagaaaaaataatgtcttcaccatattatctgacttgagtaagaaagctatgtgaatcaatgtaagaattttggagtcatacaaacatggttttaaatacagcttcttctatttataagctgtatatccatggatatgttttttaatctccttaatcctcattttcatctataaaatgaggtgaataataatcacctcacaggatattttcaaaatgaggtaaattaaatactaagtacagggcccaacccatagtaagcattgagtagttggaaatttctattatcatgattgattggataaataaggacagtttgaaggatagaagacttatcataaagtgagagtaacaaatagcttattaaaagttagaaagagtgaaagtttttatgaagaggatgatttcaaaattaaaaatgtaaagtattagcacaatttaggaagatgccgaaatctgaaatatagcttttaatgattttgattgaaagggatttgaagaattttgagactagagtattagaaggctaatcaaaatggctatcaaatttactgaggataatggtgagacatttttggagagaaagaccaatagcctgatgctgatgacattaaagaagctacagaatgtgatgataaggaagctgaggagaggattatccagtctagaatgatgtttctgcaagaactaggggcctcttatgttaatggagatggagactgtagtacttgctaaaattttcgattccatgactccaccctttatcatgtgaatcagaatctctggagatgtcttccaataacctgaatgtttaacaagctccccagataaaactatgcataataaaaatgatacttctaaagtttgaaaactatacttctagaaagatatccaaattgcactgagaactctttgcctgaggtgatattagtgaagggatgaggaatatgggaacagaaagtaagcaactggtgtggtctaaagagagtcaagagaatcaaaaacaagcaagcaaaaacagaataatctgcttttgtctgatttcgtcaaggtagagagcataatctgggagaaaaaagtgaattgcttccagggcagagttctaaggattttcttttctttggaataaaatgatggatgaaagaaagaaaagaatagtgtgctgagaatgtaaattgtcttactcactcattcacaaaattttaaaggtagttgggaagatcaaacctaacactgtatgaaatgacatttaaatgagtatctagagcattataggtgctaaataaatgttagaatctcattactcacccttattcatttgtcttataaagagcattcctgtgataaacaattatgttatgttgcctgacatcagcctttctctaaacatttagatagcaaggagactgtatacaatgcccaaaaaggaacatttaaactagcatgaaacgtaaaggatcactgatgtaaacagtttttcatttgctaaccaatttctttatggcattcccggtagatgctaatttcattcattataagagatttttcaccacataatacaccattgctctatcagctcgaatacacaatcttcctggcatagcttttacccacaacataataaacagcaatatagtgctaaatgtaagacagaaagagctaaatagttatcctgcttatgccaatttatagcagctttggaatgggagcttgatgtgggagagaggggaaatggaaatggaatgttctttcatcttctgctataaagttgcattcactcataactttggacatttgtttaggtaatggattggtgacaggaagaaatgaagaaaaagagaaggcaggaggagaaagaaagacagaaagggcaccttagagtaccattgtctgattatatcctcctctgtgctgcctctaatctttatcaacataacagcacttactacatggtgttgtttttatccatttataggtctatctccccactagtatatgtgttcattaaaggcagctttttttcttatttagccttatttatatttgtacttatttgtaaaacaaactaataacttagggcttaccatatgccagaaatgcttctacgtatctttttgtgcatcagcttatataatcctaatggtgtatatgtaaagtgctttagcacagtgtctggcacatggcaaaccctcaaaaatgttagttaacacttaatcattattgtttatgttaacaaccctctgaagtaagtgttgcaattgccatgttatacctggagaaaatgaggctaatcaaattaaactggcttgaactagattaaacaatttgtatgatttacctaggattgcatccatctttatttgatttcaaaatgtatcatattcataatcttggttatgaatattatacaacctttttgaaaaaactatggaagtgatggctctccacatgtgacttcaaatgttttcaattaaattattttgtttcaatagtttttatcataataaattttaagactatgttttgctaatttcattgtcaagccaaatttgtatctgcttaatctataatatgaaatttaaaaccatgagaatactccagaaaagttataatttttctttttctttttctttttttttttattatactttaagttttagggtacatgtgcacaacatgcaggttagttacatatgtatacatgtgccatgttggtgtgctgcacccattaactcgtcatttaacattaggtatatctcctaatgctatccctccccctccccacaccccacaacaggcccccgtgtgtgatgttccccttcctgtgtccatgtactcaattcccacctgtgagtgaggacatgcggtgtttggttttttgtccttgcaatagtttgctgagaatgatggtttccagcttcaaccatgtccctacaaaggacatgaagtcatcattttttatggctgcatagtattccatggtgtatatgtgccacattttcttaatccagtctatcattgttggacatttgggttggtgcttagttccaagtctttgctattgtgaatagtgctgcaataaacatacatgtgcatgtgactttatagcagcatgttttataatcctttgggtatatacccagtaatgggatggctgagtcaaatggtatttctagttctagatccctgaggaatcatcacactgacttccacaatggttgaactagtttacagtcccaccaatggtgtaaaagtgttcctatttcttcacatcctctccagcacctgttgtttcctgactttttaatgactgccattctaactggtgtgagatggtatctcattgtggttttgatttgcatttctctgatggccagtgatgatgagcattttttcatgtgtcttttggctgcataaatgtcttcttttgagaagtatctgttcatatcctttgcccacttgttgatggggttgtttttttcttgtaaatttgtttgagttcattgtagattctagatattagccctttgtcagatgagtagattgcaaaaattttctcccattctgtaggttgcctgttcactctgatggtagtttgttttgctgtgcagaagctctttagtttaattagatcccatttgtcaattttggcttttgttgccattgcttttggtgttttagacatgaagttcttttccttttttttttttttttcagacggagtctcgctctgtcgcccaggctggagtgcagtggygcgatctaggctcactgcaagctccgcctcctggattcacgccattctcctgcctcagcctcccaagtagctgggactacaggcacccaccaccacacctggctaattttttgtatttttagtagagacggggtttcactgtgttagccaggatggtctcgatctcctgacctcgtgatctgcccaccttggcctcccaaagtgctgggattacaagcatgagccaccgcgcctgacccagaaaagttgtaatttttaaacactatgacatcaacataatccaaaacaacttttttggcattgagtagatacatcttggtcagtaattacagtgcctcactttaaaattgactaggtttaattatgtacaaaaaagtggtcaaaagaatgctctgttccattaaatagtcacaatgtatagaggaaataaaaaaatgttttctgagatacacctttttgtaccttttctctctgaaaagttcatctgaggcctgttgcattccactatactcatccttaaaacaaaatatcttctaaaattattgcactatagccaactatgaaatttggctattataagatgaatagcactggaaacttttcaagctgatcttatttaagaggagtagaccctttctgtcaaactactaagtaggatattgaaggggaaatgtcatcttataattaacatagaatgaaaatattatttggcatgtttggtagtgtgttttgccaattagccacaaaacaaaaaataagaatcgtcaacaacaaaaaaaaccctcaaatccaaaaggaaacaaagaattcataatgccctaagtcagtctatttctctaattcttttcttgtttgtccaggtaaaactagttaagaaccataattttacaggaatatcttgtgaaatcattgagaagcaacttgacctcaatctctctctgcctctctctctctatctctccctattgttctccctctccttctccatctgtagctcgctatctttctatcattttctctcccccttacccttcatctcttcttcttttccatcctgtacctccatgattccttctttcctatccctgttttgaagagcaaaacaatacaaaaacagtaaaaataatatcaatgccttaatagaaataactattatagcagctaatatttataaaagctttacaagctctaacttatttacacttcacaacaatcttataagataacaataattatgccaattttatcatatctgtcactctaactataattgtttattgtatgaatggctgaataaatgaatatacttcacagtattagtttgcagattttatttgcaagatatcaaacaaatatatttctggatatttcttggagatatatattagaaacagatcttattgatatagtctgcttctattgtttggagggcatggggcagggaagaatctgcaatgaataggcaagaagttgcaactagccatttgaaacttaaatgatcaatttgggaaactagacaacccataaaaaatccttaccttctttctacattcttggcttttccctaagttttaaccaatgaattagctttaaaatatatctacctgtctgaataccttggagagcagtgtgttactttttggccaactgttcaaatgttacattttaataagttcccacttgtggtcatgttagatatcttcttgaaaggatgaggtcatgaaaaagaagtttaattggatcacaaaactgcacacttttctaggtmaaaggtaaaggctaggaaaagaattcattatgctacaagaaagaaagtaacctttgggtacagaactatcatttttaatgattaagaacagcatttactattagaaatatattcataatagtggctttattttaattaggaacttcattcatgccccagcatgcactatgaactctttaggatatgttaagttacagtgtggcatggcaggtgatgaaaaatgtaaggggaaattaaaaaataaattgagcttagggtattagaatacataagtgatgctcaattggcagtgaatttgacatacacagttactttagaagaggcaaaagaagagaaaatggaatttctctcctaggaatgattgcttaaatatcttgaatattttaattacatgtttcaaaacagaaacgtttgactagaagttaatgggaagtgagaattaggattcaaatatagcccccaaagtaactctcattttaaaaatgtacattccagttattaaagttgagctaaaaattgtactattaaaaatcacacttgactgccaaatattataggagtctattctctgttgattcattttgttgacattaagagaagctgcatgagttcaaggaggatataattcaagaggagaacaaaagcaacaagcagcggctcagtttaaagcaaggaactctttaggactctatactgagtcacttatagatggtaaagtctagttcaagattcagttagctgaggaacaattgttgaataaagagtcattaattttgctttcaattttatttatgtaaatgataaacattcatctagtgcctttcttttttaaaaataaagcaatggaccctggcatcttgtattttctgtttattccatgttcatttgttttgcaaagctgatcagagtattagatatcaggacgaacacagcagtcaatttcaggattttatctagtatgtgtatttccaggactgatgcattcaaaggatccgggatttagtgagtagtttatatcaaggagactcttgaaaacaacctgaagtgagccttaagagcagaagtgaggcgtatagtaggtgtttagyaggtgttgtgccagacttattgaatggatcatcaaatttagatcacagaataagaaagcaattgagtttaccctctcaaataaagtgattttcatctcaactttaactttttaccctcctttgcatttttcattctttgagtctctccactgttgaaaatgtagtaatattaaaagttygagagatcaagtttaaataagagaatctcatgtgcagttctgtgttctatgtataatttaaacttttcagagcaccatgatgaataaaaattatgtatacatagaaaacagacatctgaaagtaaactcatttcactcacacacaaaatctcacataatatctacggagaaattcaggaaaatccttccaaaaagaaaggtggggggaagtagcatctgataagatattggaaaaaagaatataatcccaatgtattacaacttctgcctgaagcaaagttctcttgtactctgactgggtcagatttcacagataaaggtctaaactctggtagggtactctgatatagtccctggtgagaagtggagtgattctattaatgaaatccttgtctttgtctgaacaaagaccattgccccaggagggcccttgagagccacaggtagcctttcaaaaggaatgtaaagctaaaattctcgacctcttgaggtccacggtgctcccaggacatttttcagtagaaatgagatcatatccttggcttcacaggtcaatttcaagctgcctcctgcctatttaaatctctagcagctttagagagatagcatagtatttggtgagtgagccaaagtttcatatcacttgtaaagtacttacacttgaaaggtactataaattcagaacattatcatcaaggcatccagttaagaacatcaaaagctattggaattttaaaatagaaaaagaaaaagtgctattctccagggtactgctaaaaagagaaaggctctaaatccagggtcattgaagaacctcagtgaaatgctttaattagaaatggcaagccttgtggtttattttcacagccatgggaatgcagtattcccaaactttttttaccctcctacccttcttgctttctgtgttcccctgcagcaaaacacatagacatgcttactaatactgggaaacacacctcaacttgctttggaaagccttttgtggaagtacaataaactccagtgtttataaatgttaataatataagaagggggttcagaatttcatgaagatagttaagaatttaactcacttctatcagcaatttccctcagctcaaaaaatactgcaatcaaaatcatttctgatgaaaatgccactgttttaaatgtctacttataataaaatgagcctacttataaatgatagagctatttatggtatggcagtaacttcacaaaataacatgattcttagaaatgtgtggtctttggcccagcctggcttttaaaccctcaaagccaaatatattatggatgtcttggaagaaagtaaactaggtacttggaacacacttggaaatgcaatcacaggtcacagaggtcttctttgtggttatgacttcaaatagtagaggtattcagcggagctgaactctgcctttcaagctaggtagattggatttttctcttaaagtttgtagggaatcagtgtccataaataaaaagggaatgaaaactgtgactggaaactgagaatgttgatggacartgattcagctctgagctgcttcggcttttcttccctggtctttctattgtccagcaaatgaaacacactataaaaccacaagaaaaaaaaacaaagtattggactgggggaggagagagaggccttgtgatcctaagaaaaactatgtaaccagcagcctaagcaaaacagggaaggatgcacattcttctgagctaatcataatgaacttaatggcaaatactgaaagaagaaaaagctttggagctcttctgtagcaataaacacctgagaaaatgcagtttttcaatatgtatgtccaatattgtatagcaatacctgttatgttttgctgttttcaaagtggaaaaaatcatttcatcagtgtggtaatccttgaaagcctcattcttatagttataccaggattcaaatcctatcatgactctgccttttaagtagtttgttctttttttccaacttgggcaagttatttaacctatttaagcttcaatttcttcaattataaaatgagtaaaataatatatgtgacaatatgcatgactttgtcctgttgtgtccggaattggtgggttcttggtctcactgacttcaagaatgaagccgcggaccctcgcagtgagtgttcagttcttaaagatggtgtgtccggggtttgttccttctgatgtttggacgtgttccgagtttcttccttctggtgggtttgtggtctgctggcttcaggagtgaagccgccgaccttcgcagtgagtgttacagctcttaccgcggcgcatctggagttgtttgttcctcccgtccggagttgttcattcctcccagtgggtttgtgatcttgctggcttcaggagtgaagctgcaggccttcatggtgagtgttacagctyataaaggcagtgcggacccaaagagtgagaagcagcaagatttattgcaaaaagcgaaagaacaaagctcccacggtatgaaaggggacacaagcaagttgccgatggtggctggggcagcctgcttttattcccttatttggccccacccacatcctgctgattggtccgttttacagagagctgattggtccgttttgacagggtactgattggtgcatttacaatccctgagctagacacagagtgctgattggtgcatttacaatcctctagctagacataaaagttctccaagtccccaccagattagctagatacagagtgctgattggtgcatccacaaaccccaagacagacacagagtgctgattggtgcatttacaatcctccagctagacataaaagttctccaagtccccacccaactcaggagcccagctgactttgcctagtagatcccacgcaggggccgcaggcggagccgcctgccagtcccacgctgcgtgcctgcactcctcagcccttgggtggtggatgggactgggcaccgtggagcagggggtggtgcccgtcggggtggctcaggttgcctgggagcccacgggggtaggggggtggaggggccttgggcatggcgggctgcaggtcctgagccctgccccatggggaggcagctgaggcctggcaagaattcaagtgcagcgcaggtgggctggcagtgctgggggacccggtgcaccctctgcagcttctggcccaggtgctaagcctctcactgcccagggctggtggcaccagcctgcggcgcagagtgtaggacccactaagcccacgcccacccagaactcacgctggcctgcgagcactgtgcacagccccagttcctgcccactccactccctccacacctccccacaagcagagggagccggctctggcctcggccagtccagagaggggctcccacagtgcagtgtcaggctgaagggctcctcaagtgcagccagagttggcaccgtggcctgaggaggtgccgagagcgagcgagggctgctagcacgttgtcacctctcactgtggtgaggaataagtaagattaagcgcttactacagtatctggcatgtgatatgcaatcaaaaaatgattattgcactgttgttaccattgccaacttcactgtgaatatacaactttctttttgaagtataactcttgggataattttagcatcatttttgttgaggcttagaaaattacacctcaaaatgaaggccttacaagcagccttagaagccaaactttctctctgaccttctcctgtcctcttgtctctggcccctcattttccccagagggtagccatagagactagaatccctctcccctcaaggcaggtcatagaaactagaacttacagagttattcctgtatctttgagtcttcattctgaaggctcttatgtcttgtatctcttgtgccttttaaaactatgatcaaatatattttatgccttttcttctattaatgtcccttttgtcagttgatttcagcaaaccttcagagaggcaaaggggaaggtctttcttggcccctataatttcatgccatatttgacttttcttggccttttatatttgacaacaattttctgatttctgatttcctgatttacataataatcaattttatatatgtattatgtaagtattccctactaacagtgactctcaggttcctagatgatgtctgaccttggttttacttgtctttaaaaagtgccactaaattcgctattgtgacatctagtagctgtcagtgattctggagcaactattggaatcatagtgttatttctggtgacatcattacaatgtaaaactacagaatttcctctcaattttaattcttcatatagagggttcaagattctttctgtaagtgcaaaataatcttagaaaaaatacatttctgaattgatagtaacaggatttgcatttataattttcaaatgaaagacaatatgctaaaagatgaattttgtgatcatctgtaacatgtttttttcagctctgatgaagccttcagtaaagtcaatttaaattaccgcactgaaaatgggctgtctctacttcatttatgttgcatttgtggaggtgagtacttgaaacttagtacttcttaaactggttatatgtgtatatcgtcagtgacttgagctgcttaatagtctgcaaaagaattctattcatactcaattttcccttctgctttgccttttccaaccttgataatctcagtttaggcagtaactatcaggcagaatattccaattgatttagctttaaatataagcttcattgtgttgctaccggaaaccaagtccctcagtttgcttggaaatcaaaaagcacttttcaatattgggcatgccagtcagggattaacttaaattcagaagcacttaaagattccccaaaatatcatcaagcagttgcttcacaatattcaacaagagtatgtggaaaagtgataaatgccaaagataagatctaaaagtgaagattgatcgaagtgaagattaagagtttaatttggcctacactttagtttgttttgtttatcaatgtatctcaagtaatttgaatggtgcctggcctgtaatagccactcagtaaagttattgaattaatgaatgaaccattaatatttattttgttaatccaaactaaattcattgagcttaacttcttaaaatggaacagaaatgtgtaagtgtcaactctaaccatattccttaaccatttctcccaaacaaaccaaacagactctgcttaacagattgttctctcaacttcaaacgtgccttcccaaccttggttatatccttcatatttctttgatctaaataagctctactgttaataatgttcagataaatcctctacaattagattttttaatttaagctttttcactaatagtttattatggtgaattctcttatgtgtttatgtttcaaaaccatctgatgatgagggtactaaataaaaaatctaagacagagtcaaaatacacagcatttgaataaagttttataaatggaaaagaaatatcccctagtaagtaaggttgtcaattaatagaaaactttacaaatggcctgcagaacgcagcttgacatttttatacagctgtatggcatttatcattaggtcaaaaagagtctcaaactcaccccatccccacaatgatttagccttttttcatttttctctttaaggcaagaaatcacatattcgaactcttatgttgaaagggctccgcccatctcgactgacaagaaatggatttacagccttgcatttagcagtttacaaggtaggacactttaattcccataaacactgcattggaactaaggatagtgtgtatctttaggcttttttttttttttttcaaattagtaatcatggaaaattttcagtgaccagaggcgttacattactaaaggacttctttctctttattgagcagatacctgctgcatactagacacatactctttttaatgctttctgtatttaactcatttaattctcacaagaaccccatgagtgaatatgattattatccccaaggttacatggttagccaggggttagccaggatttaagacaaggcagtctagttctgttgccaaagctcctcatcagaacaccatgatgcctctgtgcagagagagatgaggttgtatttaaagacaaaagaagcacactgaagctgtatttctttactgcaaatttttcttaaaaaacctttttgctttagctgtttattttcttatattagcccctggctccaacctaatctcagcacctgatagaataataaatataatagtggattggacaaactgggatacttagtgttggaattgaaccttgagattttcataaatataaatttataaaacatacaaattatattatgcattgatcattttataattataataacaatttctactttgtatttattatgagctaaatatcatactaagtttaatgtattttagtcattaaaataactgcatattaggatttactttacagaaaatgcaattaaagactaaagtagatacctggacaatattagaatagtgattaaagtcaagtacagttggctcattactcccagaatcttatttgtatattgcgtattttgttctttctcattttcaagcgagtctgtgacagaattttatttcagttttgtgtgtgcacgtgtgggaggagggacaactttttgcttgtattaggaaccccctgcactatctccctcccccaactgctagagagtttgtcattgggagggaagaggaccttattttcccatgatctagcatcacaaattcctgtaattcatagcgcaaatactctaaagtttcatctcttttcatgcccagtcaatgcctagtcaattcttctaattccttctgggagaaagcctcagttaagtgctaaattgtctttagtacctgttaattatcctgctaaactatgaaacattctgagtttccagtgtagaaaacagcatctgatgttgacttttcttctgaaaggcaggaggtgaaagtagaagagctccaaggaacaggaaggtagtgaatgatagtcatggcactgtatgaaaccatgaattctgaacctcaccgtctgggagattttttctgtattagttcattttgcaaagatttagcatgacattggcacacaaatgggttctgaatcatttagtcctacaatatttagagaatatatttcttcaacctctgtttataataattaaatttccacttttagagttttctttgctctatttttatgtttttttctattttagagaagggtgcataaactataactttttcatagcaagtttaaatgaaaatttagattcttgggaaacaaagcaggcaaaaatattaaaaggccataagaaaatgcatagttattttgcaaatttcttaacaaaagtgaaaaacaaattaaagttactatttcattttaaacacaaaaataatataaagtagttgtgtgtccagaattggtggattcttggtctcactcacttcaagaatgaagccagggaccctcgcggtgagtattacagttcttaaaggcggcatgtccagagtttgttccttctgatgtttggatgtgtttggagtttcttctttctggtgggttcgtggtctcgctggctatggagtgaagctgcagaccctcgcagtgagtgttacagctcttaaggcggcacgtctggagttgttcattcctccccgtgggttcgtggtctcgctggcttcaggagtgaagctgcagaccttcgcggtgagtgttacagctcataaaggcagtgtggacccaaagagtgagcagtagcaagatttattgcaaagagctgaacaacaaagcttccaaagtgtggaggggcacccgagtgggttgccactgcttgttcaggcagcctgcttttattctcttatctggcccccacccacatcctgctgactggtccattttacagagagctgattggtccgttttacagagagctgattggtccattttgacarggtgctgattggtgcatttacaatccctgagctagacacaaaagttctccacatccccactagattagctagatacagagtgccaattggtgcatccacaaaccctgagctagacacagggtgctgatggtgtgtttacaaacgttgagctagatacagagtgctgattggcatatttacaatccctcagctagacacaaagtttctccaagtccccactagactcaggagcccagctggcttcacccagtggatcccgcacaggggccgcaggtggagctgcctgccagtcccacgccatgtgcctgcactcctcagcccttgggcagtcaatgggatggggcactgtggagcagggggcagcacgctttgggtaagctcggccatgcaagagcccatggcagggggtcggggggaagctcaggcatggmgggctgcaggtcctgagccctgccgcacggggaggcagctatggcctgctgagaaatggagcacagcgccagtgggccggcactgctgggggacccggagcaccctccgcagctgctggcccgggtgctaatcccctcactgcccggagccggcaggactggccggccgctcggagtgcgggcccgccaagcccacgcccacgcccacccagaactctagctgggccgcaagccccgccgtgcggccccagttcctgcccgtgcctctccctccacacctccccgcaggccgagggagccagctccagcctcggccatcccaggaaggggctcccacagtgcagcagcgggctgaagggctcctcaagtgcagccagagtgggcgccaaggccgagaaggcaccaagagcgagcgagggctgcaagagctgccagcacgctgtcacctcttagttgttcacactaccaggcattaaacctagtaaccattaaatgcattaaacctacttctaattatcccttgacagaactactccagtaagtatataattcattttgggctccagttcccttcccccatatagtattaataactgtttaattttaatattatttcaaacttacaaagacaattgcaagaatagtacaagaaactgcttatccaggttcattaactgtttgcattttgtcccatttccattattttttttwagaaccatttgacagtaaattgtataaaacatgccctgttgccacttcagtcttcatttcctaagaacaagaaaattcacttacataactccaatgcaattataaaattaaaaagaacattgagatgatattaacattgataagatatgataatctatagttcaaattcaagttttatcaattgtcccaattgtgtcatttatagattatattttcttgtccaggataggattcaatccacaatcatgcattttcagttttcttatttctgtaatctcccttactctgaaagaatttctcacccgatccttgtatttttttatcttaatatttttcatgcataccagttatttatacatatttctttgaatttttttggtattgcaatcgaattttattttgttcataacactcacaaaatgaataatgtaactctcccatccttttgttcactacatcaaatagctctttcaattatacaccctggcatgctgggcctgactcattgttagaggaaaggggtcccgatccaggcctcaggagagggttcttggatctcgcgcaagaaagaattcagggcgagtccacagtgcaaagtaaaagcaagtttattatgaaagtaaagtggtgaaaggacagctactccatagacagggtaggatgttcctgaaagtaagaggaggagcacatccaccctaggtacaatgctcatatacatggggagatgtgttctgctgcaagggtttgtgataacatattaattttcttaattgctatattttgcaagaatcgatattattatctttaaagcaaaattaggaatgcctttgttctacagatatcaggatatctggacactcccaagtctgggtctgttcagtaaacattatgaacttgttctttaactgtaaacatctagaggttaaaaatgcctaacttttgggaggccgaggcgggcggatcacgaggtcaggagatcgagaccatcccggctaaaatggtgaaaccccgtctctactaaaaatacaaaaaattagccgggcgtagtggcgggcgcctgtagtcccagctacttgggaggctgaggcgggagaatggcgtgaacccgggaggcggagcttgcagtgagccgagatcccgccactgcactccagcctgggcgacagagcgagactccgtctcaaaaaaaaaaaaaaaaaaaatgcctaactttctgagaatgtaaccccgtaagtctcagcctcattttcctattttcctagccctcactcaaaatggagttgttcactctggttcgaacgcctctgacatcatgactgtatattttctaatcaatagagtaatctctgctttcattaataaaagtgaagcagatatttagctatttaataccacatgaatgattaatcctcatacatctttttgttttagtttgttgagtttttcacagtgtttagttttattgaggtttaatatataccaaatacaattatcaattttaagtctacaattgttagcttttgaaaatgtatgtaatcatgtaaccatcatcacagtcatgttataggacatttctactataccaaaaagttccctcatgccattttgcagtcagtctccttctcacctggtctctggaaacaagtgttttctgtcactatagttttctcttttctagaattttaaataaatttattacatccagtatgttttcttttctatatggtttcttgcacttatcataaggctattgggattcacccatgttgtatattctgtaattaatgcttttcttgtagaattgtattcccttatatggatataccacaatttaccatttacctgctgatggacattttcccagattttgaccattataaacaaagctgttctgaacactcacatacaggtatttgtttgaacatatgtttttatttctcctgggaaatacctaaaagtggaattgctgagtcacataataagtatatgcttaattttatgagaaactaacaaactttttaacaaactagcaattccttcctacattcccatcagcaaggtatgagagctgtagttttttcacatcctttccggcacttggtgtggtcagtctttttttttttttttttttttttttttttttttggctattctattggatgaattttagtatttcattataattttaatttgcatttccctgaagactaaagaggttgaataggtttttatgtgcttattaggcatcctttattttttaatgtagtgtctgttaaatctttttgccatttgtaattttgtttattattttcttgaattgtgagggaactttatctattctaatacaattcttttcttgaatatacttttgcaaaaatttctctcagtgtctgacttgccttttcattttcataacagtgtcatttgaagagtaaaaggtttttgcattatttttaaacttatgactgtagtgattaccatacagttatagattctcaacatttcatagtccactccctgcaaatgttgatctacttcacttaaaatataagaaccttccagtagtatagtttcattttatcttcattctttgtgccattgttgccatatacattgcatctatacatgataagaacctaaatatattattagaatttttgtgttaaacatttatatcttttaaagaaattaataagagagaaaatatgcttttcggaagtttgattataataatcctacatatggttttctgtatttaaaactctttgagattcactgagtttttatatctgtaaatttatggtttcatcaaattcagaaattttgaccattagtttttcaaatacatatgttagattgtttgataattttccacatatcactgagtctgctttttttcttccttcttctttctttctgttctccaaattagattatttctacttatttgaattcaagttcacaaaccacttctctgccatctcccatctgataacaatccaccagtgaattattcattttggttgtttacttttccgttctaggatttttatttattaagattaattaagatataatttcaatttctctgctatgatgacacatctgttatttcatttttccatattttccttcaaggttttgaacctattatttgtgactactttaaatgtccaatctgctgttttcaacatctagattagctcagtatttgtttctatttcatgttgactacagrgcacatttttctgtttcttcatatatcaattaattttttattgaaagctagaaattatgtattatgtgttataggaaatctttatcatgtcatcttcctttaaagaatgttgagttttttttatgtttgtttttctttcatttttggcgggtagttacacttctggtggatacatttcaatcaaatcagtcttgatttgattttttgttaggctgaaggtatttcagtttgaacttagcctcttggcttacctctttttttttttttttttttttttgaggcggagtctcgctctgtcacccaggctggagtgcagtggtgcgatcttggctcactgcaagctccgcctcccggttcaagccattcttctgcctcagcctccggagtagctggggctacaggcgcccgccaccacgcccggctaattttttgtatttttagtagagacggggtttcaccatgttagccaggatggtctcgatctcctgaccttgtgatccgcccacctcgtcctcctaaagtgctgggattacaggcgtgagccaccgtgcccggccgcctctcggcatacctcttattcctagcatgtggctctcacacctgaacatggtgcttactcctaaagtatgattttttggcatgtcacctgaattcccaagtctctcagtaaagtctcttcataccagctgacaggagttccaaaatccccccgtactacatgacctccagtatcaccaccattcaccttttagcaataaatcaggtgatcttttctagatcttccagaatctttctctgtgcttgtgcagcccagctcaacaatacataatggatctccatgcagatttctgcagtgccctctctgtgcagcttcttcttctcggttaccctgctccacaaatacagccccttcataatatcagaactctcatttacactcttaactcagtgagacttcctattatgctttgtggcagaaaagtatttcaggcagaaaaccatggcaatcatgggatattgtgtgacttgctttatatctttctcttaaaggacacagctgtttgctcatgctcttcagtgcttgagaacagttatgtcatatattttgttccattttgtagattttatttgccagtagagaaagtctatataagttgttctgtcatgcccatatctacttttgcattgcttccaaaatgatcwgaatgaaacaaaaatctatgatatcattgctcactttaacacttactattgtcatccattgcctatataatgacattcaaactcctaaatatgagactcaagatcccttaatttataacttttctggaatcactttccatactcttttcctgtagtctctgcctgttcaaccctaatggttttcaatgtaatgtgcatgaggatcatatagtaacatacgtttaaaatgaatatttccctttctactttactctcatttaaattggtacatctagggtattctaggaatctaaatttttaacaaacaacctaggaattttgatgtaaacaatctaggtctacatattgtggattactgttcaagcgtggcaactcaaattatggtcacatgatcagtagcatccaccccaactaaaagatttcagaaatgctgctctcatttcctttccagccctattcaaccagtactattcaggcgtttctagagaaatttaaccaataggattaatggatctatctatctatctatctatctaatctagagacatatttattataggaactggctcacactattatggagcccaaaagtcccacgatcttccgtctataagctggagaatcaggaaagctgatagtatgatttggtccatgtccaaagacttgagaaccaggggagcctatggtgtaaatcctattctgagtctaaaggcccaagaacgaggatcagtgatgtctgagggcagaatatggatgtctcagctgaaataaaaacaaattcaccttccctctaccttttagttctattcaggccttccaaagattagatgatgcccacccatattggtgagggtgatcttctttttcagtctactaatgaaaatgctggcagggcatagtggctcatgcctgtaatcccatcactttgggaggctgaggcaggtggatcacttgagctccggagtttgaaactaacagggtgaaaccttgtctctactaaaaatacaaaaattagccatatgtggtggtgtgcgcctatagtcccagctacttgggaggctaaggtgggagaatcacttgaagtcaggaggtggagattgcattgagctaagattgtgccactgtactccagctgggcaatagagcaagaccctgtctcaaaaacaaacaaacaaacaaacaaaaaactaatgccttctggaaataccctcacagacacccagaaataatgttttactagctaactaggcatcccttaacccagtcaagttggcacctaaaattaagcatcacaaccagaatgtacatttttaaaaaaatctcagctgatgtatttgtagattaaagtttgaagattgccattttagataactccattttttaggccaaacagttccacatgtctttatttttgtttttataatttcttctgcttaaatattttttaatttcttttcctgatgcaaaattattacttatttaaaaccaagataaactgagttttattgaactcgcagacagaaattattgcactctcttttgggtttcagttattaagtttacattatcttttattgtagcacttataattatttatttatttgcatatttcaaatgttggtctgtgaactttggacactgggactaagtctttttctttgattcctcagtatatgtgacctgtaaaggatccttgagaaatacttgtttggaaattagtgagtgtccaaacattagaacaatacttgacatttgttgatattatgtagcttaagaaagactgtcagcttagaagctagaatacttctgttcatatctcagttatgagacttgctaattatgcatatttaggcaaattgagttttccttatgctcctcaattttctaacctctaaaatgaagcagatagaattatctattttattgtgtagtttagagttttaaggaaacaaatcatatgcagtacttagcaaaatacctagcatatagttaatacttaataaaaattaaccattattgttgttgaactctaactttgacaaacatttattggaaactaacatgtttttcattttgcatagaaaaattaaaagaaatggattggattttctggattattacattctaaagagatgagaaaaggtaatcctaacaatataaaagaaatggcatctatacttagatcaatggactacaaacatcttttatcacgtcctctataaaattagcactcccaaacacatatatgtgttcataaattatatacattaacaaaaaaacccatcagttaatagcttaagacaaaatctactctttggaaaacaaccagtgttaaagtttgtagctatacatttatatttcaaatagcctttttgataatataaaatattttgacaagtttattacaaatatgattagattaggaaattgatttatatgaagctcagattggtagaaaaaagtaccagctttttctttgctgcttcttaccttagtaatatatatgttgtgtattttcttcacaggactcttttaaagatacctgccaatttcgtctattcagttgaagtgtctattcagttaaaatttgatattaaaatttataatcccacttactttggctcacataagctacagcacatccccaataactaaaagctaagaaaaaaaaaagagtgagaggcagctctcagtcctttcccatgtagaattttaagtatatattatactttgggtactatatgtgacatatgactagctgatatatgaactgaagccgccagtgtaaatttacatgttaaacatgaatgaaacttcatttatctttatatataaatgtatataagcagattttctaattctttttgtaccctaatgaattttattacaagattcctgtcacatttatatccctctatagggcatacttctttaggtggtatctaaattgtattcctaaaatgaaacacaagactttggggaaaaaattgagacctctgatatagtttagaagatcttaattgagaaagctaatgaacaaaatcctattagaccatctaatttagccttacatgtaactctcattcaatacacagacaagccacttagtgaaatttctttagtgagaaagaagtagcattttgattcattaacttatttttaacatttcgtatgataaaagcagatattgaatggtaatggtcatttatcccatcctatatatttcttgcaagatttaattcctatcattcagaaacaactcattttatatatgtattacaaaagggaaggacatgaatgggggaaaaatcgaattaaacctatgttgcctggcttaccagacctaggtattttttgctacgtaactgtgcccatcagaaaactctgacttttctatcagtggcgattcgtagcctgaatcattgtattaatatcttttatcctgactttttttttcctccttagcacatatatttgattgcaaagttgaaattttcaactatcctgaaactaaagacccaaagtaagtgtttcatagtttctaactgctgtcgatttagaccaaggttcaacagccttggcactactgacaatttggattggataattctttgctgtgggaggctgtcctttgtgttataaaaatgtttagcagcatccctgtcctctgttctctagatgagagcagccacttccctcatgcccagttgtgagtaccaataatatctccagatatcacccctgagaggcaaaaatcactcccagttgagaacaactgatttagaggacagatttcaatattcattaacttaaatggattttttaaatcttaattacctttatatttgaacaaataaagtttcctgattaaagactgcattttccctaaatgggaatttgacaagatagtaataagaaataatttgaagaaaaaaaaaactcaaaaaaaaaagaatcccactttttgcatatttaactaaattctccagttagtgatgacttttaaacactttaatagtagattttcacttaagaaactagagaaaatttttactcataaattacagcaatcattaagatagcttgtttatatgcagatttccctttagtaatgaaatatttcataatctctttctaaatgaacacattctcaataaaaagttaataggatcctagctgaagatggtaatttgcaatttatgcttcaattcttacaccagacagtagtatttcctggaaaaccttccctgatccctcccaagtttgggttaggtattgcttcattgtactctcttagctcctagtacttactatgctgtgtatgctactgtatattattacttagttaaatctttatatcttcctctatattagcggtcacaatctcacatattttaaggatgacataaataaatgaaagacagacaatgataaatgggaagtaaaactcaagactgaatatttttgagatatgagagagtggcaaagactgtggtaacttagaaaacatatgccccatgtaaagggaatggtcactcttcagcttcagctaatcattgtcatgtaaaaatgtagacccattatttcccaaaatttcagagaatcataaattatgtgaagtttcctaatatttaaatgctggccattaatgcagatttttagtcataaatactcaacaggctaagccatatatatttccattcctcttgtagcctgtttgtaatctctgatagtaattatgagcatcatcaaggcagagaccagatccaagttgcttatcatcttattctgagtgcttagaacaacgcttgatatatatacttaataaattgatgttttataagtgaagaatgaagttatagttctctggtaactggggggaagaaaagtgtttcaaaggaggtaggatgaggttgacagtgggcaaaatggtcctatttgggccattagaataggaaattaggaaattgtcagatacctctttaagggatattttagtaaattttggggagaagaggatataaaaatgggttgaaaataaatacagttagggaaatggaggcaataaacattaatttctcttccaaaaagtataagattgggcaatatttgaggaatggccagatcaggaaggtttctgaaacagcattgtcctatctttttaaactcttgctccttaaataaacataaaagttcagagtttatttaaatgttatttttaaactttaaaatagatattatgttatagctaaaaacaaatttaaaaaattagaatattcattatgccttttcaagtagcatgtatttacttcccccgccccactgcaataggtagagattcttattatcctcttcctgttaaatcatctctatattattaaatgagagatgatttaaggatgttcaaaggccaattggaggcagcctgcaggaataaatacattatggaaaatgagaaaatagaagaaggagggatggcagaggtgaggggaaaaaataggtccaaagcaagggtacagataatctaagagtatgttacttctctttttttctttttttttttccaaaatttcaagcaaagtcaagtatttccaccacactgaaactcttaaaaactgatatcttttgtgaaaataaatccagaattgtttcaacaggagacatataggtatgaacctttgtgagttgagcagttattttcatactgattaatggatactttcactggggatgtctatgatgcacgaggcagctctagtccattaaattttaatgcctagaactaagtgcatttcatactgaagccctgaatagttccttgtcctaaaggaaaacttaataatattcttcaaagcctccaaaattacttttctaaaaaaacctttttctttataaaaacaaataaactttaacaattgctatgctggtgaagaaaaaatatacttagagaaacattttaaaaacttttatttatatgtccctattttatatccagaaacttagttttctttccaatcaaagttcagctccttcttggagtttggtatgacacttcagggaatattagaggtgaataaggtattacagaaaaaaatttagcccaactctgtaaccctgcagataaagaaatggaagtattttatgactaaacatctcttgggacagagtggactaaatcataaggtgaatattctcatagaagtaggccaatcttgggggtgatacatttaatatgaatataagcttacacctgtaagtatcttgagtttataagcatttgcacatacattatttcatttgatctttattacaatcttgtaaggtaagtaaggtaggtattatatttctttttataaaaatgaggaatataaggtcagggctgatacatgaaagacaaattattagcagctgaagggtaattggtggggagggagaaataacatgatgtattaagaaaagcataatattaaaaatcagaagacctgatttcaaatcccagttcagcctcagtttaaagttacattaaagaaacacattttatgctatggaatgccaattgggttctctaaaaagcattctctgaaaagaatgtaggagtacaagaggtttatttaaaggtgacacctgtgaaaggaaaaggaatgaaacagaattggttatgaggtgccatcagatcccaatacagagctgctaaaatctccgccagcccattgaggagctccagaggaaaaattgcctatgraaggagtgccacacgggctagaaatgtcgaggcccttcttttaccaccaccttactcagtcattgactgggagtaaggtccaccctgagaagagactgaacacagctctaatgctgcagtgggtcctgaaataactgagaaagctgccagtgaactaccatcctgccacactcttcataaagggaggtctcagtggcatatctatttctgccacacatgaggaaatgctcatgattctataatatatgaaaaaaggaaattacctatatgtagaattagatcaatagtgtacataataacaattattatgtgtcaagcattgtactaaatgaattacagcattatctgatgtaatcctcacaacaatgctatgagaatgatacaattgtatcttcattttacagacaaaaactggacagctcaaaaggttaagaaacatgtcgcaaatgtaggaagtgcccatcaatattgaaacacgagtttgctttgctgggatagcttgtgctccatctggttgcacaaacatatgtacataggacaaagaatggaagggaaaatacacacataaataatagtgattatatggtagtactatgggttattgaattatttattcattttctttgttttttacattttcttctctgaggtattctggttgtctgttgaggcataacaaactatcccaaacttggtcttctaatgcaactattttattattctcatggattcttagttcaaaaattcagacaggatgccgtgtggatggcttgattctgtcccacaatatttagagcctcagctgagaaaatgtgaatgaatgggtttattcatcagctggtagcttggaattctctggaggcttaacacactgactggaataagtgtaaggctggacttagctagaacagttgattggagagccttcatgtgcgatgtaccttctccatgtggcctgcattttcttataccatggctgacacaggttagtcagatttgttacgttatagatcagggctcccagagtgtgtttttcagcaaacagaaaggaagctgtgtggtcttctatgtcctagccttagaaaagaaacactctgctccacgctattgatcacaatccacccaggttcaaggggaaggggcatagatagcaaatatctgtgggttgagtatagatgaatgctcaccatgttttaaaaccaccagaaggtatattttgtccataatcagaagaaagtacatttttatacatcagtttcttttctatactgaaatagagttgaaatttttttgtttaataaataaattttaaaaatggatgtaatatggtagtagaggatttgagctctgtgatatagtggttgcttatcttggctttatccatagcaataatcacagagctaacaataaggcaggatattaagtaagcattgttttagagttttatggctagtacagagttgcagttactaccattacaaaatatttttatccatttacatacattttgggagatctattctacctcaaattctatttctcaaggatatagctggagygcttttttgtctaagcctcattcttccacacatggattttcttctgcttaaaaataataaatatgacacacacaaatacattacaaagagcttatttatctcacacttatagggtgcctctgtgtgtcacattgaataataatgctttaaatttggctagagagtgcataaaggaaacttgtcagtttccacaagactcttttctaaacaagtcttaagagactttcttttaaaaacattgccattagacatttcttatatatggtaaactgcaagcaataaatgagatcaaacttagagtattcaaaatttgcctaatatttgcattttacaggaaaattttttccaggaggtgtgtaccatattgctgactcttaaaattattccattaggacaaaatattccagtagagtaagaggcttatcagttaaatacagcaaaagtatgtcctctcaagtttttccttgagactcgatcaggaaaaccactatggaaagtcagaagtgaagtacagacgttggagtccaacagacctgggtttgcatctaccttcaacacttacaaagtaaggttcagttagcactttaaattctttgagcctgagtgacatcggctataaaatagggttaataattattttctctcataggtaaattgtgaagcttaaatgagaggatatagatagaacatttttcatggaagttggctcatagtaagcaatttatatgcagcaattactgctttatgtttattatctttagcatagctgcataagataaaagttttattttggcagtattcagttaaaaagtatttagatcaattagaggtcaatcttgagaaatccaaccaaggtatgaaaggataaattattactcttaacttttgaccttaccatttgcccattctgaaggaatcctaatatactttaaaaaaattccacaaatattgactgaataaggagaaaaaacaaagatacttgaagaaaggataaatgtgtgtttactaaaactgcctaatagataaatgtttcacatgctctgtgatttacataaaatttattttaatttagcctagtacagtgcttgtcataaaatagacattcattaataaatatttgttgaataaaagagtatccatctttctactgatttatacaagttatttatgtattaaatatgtaaacaatttgtcagttttatatgttgtgaatatttctccaactcgtcacttgccttattgtgtttttaacactttaatttgctcaaatctatcatattttctatttaaaatataactttatgcttaaaaagaccttccctactactctgcattgaaatttctgaccatctgcagggaaaatgttttaaggcgatgtttttcctatttatctcaagactaatcatgcctttagccctcaccaagattattggtaaagtgagagttaactcctgtgaactgttttctctggaggaggaattctcagtttctggcagcctatccatggctaaactagtagacgttttctcgcttccagtactggtacagcctttttccatgttttattcctttgtttgttgcagtgcctaactcgtgaagcagagggagtggagttaggaggaagaggtaaagggaaaggagaaagagaagctaagtgattaaatcaaatcaatattttatttggaaggtactataggtattatcagaacaattttaaggtggttacaattactctttttttatataatcaaggaaattagcaaaaaggagtgwcagaactgctccagtgcacatagtcattgtgagagctgaaattctaattagggaggctaattctatgacctgcatcttaaccctgccttatatgcagctcaaatttaacatgtgaaaacgaaacattttacttctgcctcaaaatctgcttcttcctggttcttccctatctctctatcattaatttccctactacttattgcacttggaaaaaaatccaaataccccataccatggcctagaaggccctgcaagattatacatctttgacctcatcttgaaaatttcttttcctttgtttaatcatttactcaacattggccttattgctggtcttcaaacacaacaagcttatatctgtctttcgacttttgcactagctatgtttcatattttaatacttatccttgaaattgtgactttttgccatctaccatttatctcaaaagtcacctctgcagtgaagctttccctgattaaccagtttaaaatagccatctaatcatttgtctatttttatctcatatcagttggtactttaagctactgtatagcaatttcttatttgtttactttttgtctctccattcacgtaaacatagtaaaatataagctctgtgagagcagcgatttcactatctttactcactgcagtgtcaccactgctcagaaaagagtttgaaacaccagatatgctcaatcaatatttgtttagcatataaagggtatattgaaaagagaaatgcataatcaaaactgggtgtaggaaaatgtatctaattgtatgcaggatggactgcaatgggaaaaagtattagttgaggagactagttaggaagctgcgtaatacagaggatgatgctagaaataagaagaaatgtgagaagtataagtcagttaaaaccagtagaattctgaaactgagctgaagggactctaggtcccttggaataaaaaagtgccattcatataaataaggaatgttagatgacaagtcagcctgggaaaattataaacgataattataagaacaatttcaaattttgcatttgagatgccattgataggcaaaatayatgggactcagacttagcagagaagtcaggaccaaagatgcatttatcagattgtatartaattaccaaagtggcatttaggaatgggaaagcagcttagggctacatttccaaatcatacacttttagaagacagtcagaaacaaagaataggcaacaaaaaggaatcaaggaatgtatagttttaggaaagcaaaggagataagaattttgagaagaaagagatgatctaatcatagagagaatgactacaaggacactggatttgatagtttacctttagaaattgaagaagtgatttcgggagactggtgaggtccttaatgcctcaggtggaagaaacagtcatggtgacttcacctggtaatacgatgaaaagagatgtgggaaataaatctgccttagtgaggagtagtgtgagaaaagcaaaattcaatgtagaataagtatggtgaactcatttgagatttatgtggaacttgggtatacctacctaaagattgctaaagaaatgagactgcaactgtcaacagattcaatatcttttttcagaaggctggaaaatgaagggaataatagagataaaatcagcttagcttcagtgggaaaaaaaaaacaaaactttttttttaaaacggagaaaacataagtttatagttcaagcatatagagccaatgaaagaagaaaggttgaagatkcaatatttatttcactttcttgggagagcaggtagaaaaacgggaagatttggagactataacattaattttactatttgtagctctttaccaaagttttttcattttttagaatttcttgtaggcctttatgcaggtgtgacagcattaagaaatcaaactttgccttttaatggtaaaattttcttaacaaacagtatttgatgttatatgtatgtaagtcataaatgcactggcctatcttatgacttgactttattgctacttggtgtgttgatagaccaaatattatagaagttgtggtttaaattcctactttgaggcttaaacatggaaatctttgtataacaaagattaaatacaaaacaaaattacatattgaatttcaaaataaaaattcaatgactgttaattgctattaatattataaatattatttcatgtatctccaaaggcagaaatacaatacaaataatattataaaaaagtaagaattactttaattgttgcacaaatttttcaaatttggaggctcaaataatagttctaacatattcactggtaaaacgagtcaagttaagaaagatattatgaattaattgtgcctagatttaatgatattatttattagtaagaagaaattactgaactatcatgaaacagcctactgggctgcatgtactttgttcagtacttggttcatactctcttcttaaatggcatatttcatcctcatctctaaaagaaaaaaaataaacctttaaactgttactgtaaattcctgacctcactgggagttaattctagttgctggaaaagcatattcattggagtaacctacctgtaaaactgagtttgtggttgcaagagtctcaccataggtaatgtcctttctgtctttcttgttcaagcggtagaggattgattagaactgarcacctctgtcatttggtcctactttccaccatctgagaactattctctggtatctaatgtgctcttatgctagaaatcacacttaagtttcctttgagcacctgaactggctgataggcagaaaatcaatacatcctgttgcacagcttttgaacctgttattagcagaaaagtaacactaaagatatgtttccttacaggataatgcagaattgatcacttctctgcttcacagtggagctgatatacagcaggttggatacggtggcctcactgccctccatattgctacaatagctggccacctagaggtaagtcatgcctttggcacctgtgaaaacaaaggttatttaccttttcggttgttgttcttaactgttttgaaatactgtctttgagactttacaagttggtttattttttagctactgaacacattggggtaaaatttagctgtataaatgagctttggatagtcaattcagtcaattttctaacagtgtatttaatcatcarttaacataaaggtagctagatatacagaggctttatagcagctcagtttccacaacttgctattttaaccttggggaagttactgaatctcatgacctccctcttttcttcacttataaaataggaatattagtaagcctattataatgattaagttagataatttatataaatcactttgtagtttgcttaatgcagagtaaggacaaaatgaaaaatcattcactcattcatctacttatgtattacttgaatgaatatttattcatcacctattatgcaccggatactgttttagatgctgggatgacagtagcaagaaagtcaggcaaaattttcattttatagagtttagctgtaaagaataaaatagacaataaagacaagaaaatattacataattttaattagtagtgagtaccataaaaataataaagtgaggtaaaatgaaaacaacgagagagaagggggcactatttaaaataagctgtacagtaaatatctctgaaaggaggtcatataggaaaagagatttaaatatattgagaatgtcagccatgtaaaaggagagaaaagaatttcaagcttaaggaatggcacttgcaaggaccctgaggcctaaaaaggctgggtgtgtttgagggacatgattgagccagagttgttagagtggagtgagcggaggaagaatgatgaagacaaggtctggtgatgaatggttccaagccaaatcacacagtgttttaaaggtcataggaaggactctggatcttgtcttaaatttaaagtattaattttatatatcctattatgggaaggacttccatttgcatgatttggctaacttcacaaatcctcatcgaatagtttttattgccgctgccatttgatagatataaaactaaggctcttatatagtaattgccttgacaaattacaaagctattgaggaaaagagccatgtttggaatcctgatcattttactcaaaatcccatgattgtcacactctatcaattgtggaaacaccaatagctcaacaatgtaaaagatgagaagtctgacatccttattattaaatagttatgttcccccttttagtcatgttgcaattcaattataccttcttcactaatacacacacatatacgcacacaaactgtgaacaaatagagctgcatataaaattatacttgaagcctgtaaaacagaggtgatccatctcccttaacagtgtcacttcaaagggctcttacattcaatacaaattaaaatatctcgttgagagcaaaatagtttccttcatgttgacatttccactcctttccatatcaccttatttcctggaaaataaatccttttagtgagattcattgtaaatataggtgagtttgtgttacttatgaggaaaggggaaattccattagattcacctaaatataaatgttttccaaaaaagaaagaaagaaactgaggccagtgataaagtaaatgagtggtaaacattaagggatctgggtgaaataatttatgagttagacactaacttctagtaaaacatgatcaacctcttaatgccaggaaaattacagactatgtcttcaaaacaaaatcctttttttcctaatgttgttttgatgatagcattacaatggcttctaaagcaaagtggttaagagcttagtttcttcatctcctattcaaatagctctgttttctttctttctaaatcataatatggaagaaggtattatattgattttaccagacttagggcaaacttcaccaaagtattccaaatagatctctactcttgccttgcaattcttcatgggttttctaattttcctcattagctgatatttgatgacttttatagtcaatagctaacactgcaaaaagcaagtatagatacattagcctttattctcttcttatatgggggactaattaaattattgatcaaataataaagaaaagggtatccaaaactatctaaaataattatattcaaaatgaatatttttgttggagtatttctttgaaaactattaccattgacttttgaccaatgtgggagttaggagcactgatcccctgtacagttgaaaatctatatatacattttgactaccctaaaacttaattatttatagcctactgctgattggaagccttattgataatataaacagtccattatcatgtatttttaatgttacatgtattatatactatattcttaaagtaagctagtgaaaagaaaatgttataaagaaaatcataaggattagaaaatatatttactatttattaagtggaagtggataatcataaaggtcttcatcaccattgccttcacattgaataggcaaaggaggaggaggaagaggaggggtaggttttgctgtctcaggggaggcagagatgaaagaaaatccatgtatatgtgaacttacatagttcaaacctgtgttgttcaagggtcaactataattgtagtaaatagtcactgtcaatatatctttacccatacgtgtgaattcatttaacattttttcagcccctactttgtctataaatggttagaatatagaaatataggaatgatacaacaaaataagacatagatttttcccctaaatattctgtaatgcaactgggcacacaaaataaatatgcagaaaaaatatataagcaattcaaatgtaaaacagcaatatagttataagtaaggagtaggatggatgagagtaggtttgataattgggaatacaggtgttcctcaacttatgatggggttatatctgagtaaatctatcatgagtggcaaatatcataatggaaagtgcatttaacacacctagcctactgaacatcatagcttagcctagctgacattaaatgtgctcagaactcttacactattctacagctgggcaaaatcatctaacagaatacctcttttgtaagaaaatgctgaatatcttatgtaatttattgaatactgtactaaaaatgaaaaagcagaatggtcgtatgggtactcaaagtatagtttccactcatatgtatcactttcacaccattgtaaagtcaaaaaattgtaagctgaaccatcgtaagttagggattatctattattagaaacataataatgtagagaaaatgtcagagaacacaaaatagaagagttaagagttcagtgaggatagagattgtattagtccattttcacactgcttataaagacatacccgagactgggcaatttacaaaagaacgagatttaactggacttacagttccacatggctggagaaggctcacagtcatggcagaaggcaaggagaagcaagtcacgtcttacatggatggcagcaggcaaagaaagaataaatgagacgaaaaagcagaaacccctgatcaaaccaccagatttcctgagacttattcactgccacgagaacagtatgggggaaaccacccctatgattcaattatctcccactttgtccctcccacaacacatggggattatgggagtacaattcaagatgatatttgggtgggaacacagagccaaagcatatcagagattaatgtggactcaaagagttagggaaggagttatgagaggggatttaaaattgaactagtctaaagaatgatgagaactagacagcaaaaataagagggatctggcccaaaaataggaaggaaagaatgagataagcacagtaagggacagtgagtaaaatgataacatgaaacaaattgtgaagagtccctctaggtaaaattaggtgttaagaatagacgagactaaagaaacttggagagtagaagtctaaggcgtttaatttaatgcaagaagcaattactgtggtttacaatgtataacacaatttctgtggtttacaatatataacacacaagagtagatggcatggcagattaagagattagtagaacacagaatttctcactctttaaagaaaattagaagaaccaatgtgatttttcccccataggaaacagggactaattgagaaaatatttcagcaagagaataattggagatttgataagtaacatgtttaaaaggattactttactttgactgcatgatttagcatgaattctagtgcgattacatgatgattaaacaaagaaagataaaagcttgggtaaaggattcaatttggaggaaaaatcaattagctccacacatgttgattttctgatgacatccaaattttcaagtggaaatgttcattaatcatttagaaacatacaaacggcatttaatggacacatttgggtttaacgtaaatttttagaaattatatatagagaggtaatatttaaaaccataataacagcttaaagttgtatattgggcataatggatggtcataggaccgagcctaagagaatctccccggagacttaaggaattattaaataaggaattattgaaggaaacaaagaattgctcagtgatatggaaaggactaagattattttaatattgcaattaggagagtttcaagagttaaaggatcccaggtatcaaaaaagttagtgcagaaaagtagagcacattgggataaaacacacatcgagtatttccttactatgctaaaaatttaggtgcttattccactcctattttttattatcatggttagcagaaatagcaacggatcagtgggtgttctgtttcattactagtcactatcttttattgcccacctttctctgtgaaacaatagctgatgctaagtctgacaggactctttgtctccacatatcaaattcagaccttccattagtgtctcaagtgtgtttgtcctcccataattgtgaattctattaaacaatcttacaataaaatttacattgactaggcagctgtcttcttcaataatagaagagaacatgtgctgcagattcctagacatgctgactacaatttgggactcagatttaaatttactgtgctttgaagagtaggcaaatattagttgtcccaggtctcaatacttctctttgactgatacatccatctatcaatacatttgcatatgcttctttgtacaaggcctaagatcctgtcagcaatcaataaacatgcattaaatcctctttttccctttaggtttggggaatgtgagtcatacgctttcccaggcatggaaaaggaaaaatattagctaacatttggtggtactttatcattcacatacatttgtcatttggttgttttgtgagataactactgtcagactcagtttattagtgaggaaactgaggactggagaagctgaatgacatctacatgggcattcagatgataaataaataagctggatgggactccaacctggggatctaccttcacatctgtagtcttatacataaaagagcgattrctccccagagactcttctgtttattgctataacacagcttatacccacaagacacaaaaaaagtatttggaaagtgaaaaaagaaacggaatatgttactatataaagcccaagcattactacatatacgattaaagcaacattaaatgactcaaaactaatttcataatgcattcactatatgggcataacctatggaagtataatgtaggtatatgagcacacaacacacacacacctcaagtgtaaaacactttatacttaaataactccttaaaaagttgttactctggtgttacgtgctgtagtttctgcagttgccataagtcaaatcagttttctgcagccgttgacaactgtttgagcagtgaacagaaaggcatgcagcaaacatgtaaaccaatgtgtaatgtatagaggttgtggagtggttttcttattacagaaaagtgtactttcatatacaccttgtgaaggtgagcgtattattcatagttgaagttattctatcctaccatatcccattttcaaattgtaaacacttattcaatcactgcttcagaaatgcttcccagttattttggaacttatttctgatttcaaggtaatgcactcagtattgtttcagttcattctttactaaatcatccaaatgtttcagtagagaattttgtttaccaagaagcctcrgaccctgtgtaagttattttttaataatcgctttagtttcctctccaaaggcacaaatgacagaatgcttagaattataaaatatggtttctctctctctcttatttttaattttttagagagagggtagtcatgagttttttacctaaacagtagcaagtctgccccaatcttgtgaataggcaatagtcccttgtgaactccatttggaatcagaacaaataatgaaacaaaataatagttaatgctttgaatagataactttgtactgaacatattaattgacttgatcctcagttgagagctctctcactcactgtgctgtactgcttctctcctgatccaaacagtaacctctcagctcacctgaccagaatttaagctttggacatgatacacagaagcttagaatatgtcaggaaaacatgccatatctgcagatctgaaccccctcaaagacttagcacattaagatattctggtgcctttttgtatggtccccattcttttgggctgtataatttttctctaaaatttctgcattacattttaatagctttgttgagataaaattcatataccatataattcatccatttaaaatgtacacttcaatggtttttagtatagttgcagagttgtgtaatcatcaccaaaatctaattttagaatatttttgtcacccaaaaaggaaacttaatacccattaagtagtcagtcccacccagccctcactgccaagacaaccatgaatctactttccatccctacagattggctattccagacattttatataattggaattatgtaatgtggtctttttgtgactggcttcttttattttgtgtaaagttttcaaggttcattcattttcagtaaggttgatttctatcaaaattatgttataattacatatgactttatttagcaaaacagaaaaagatacagattcaactgatagtgtaaatgcaatttctttctactacctgtctattttcattataaatcaatgctggaaggaaatcttcaactaaaacttcaagtccccaaactacacttctagtcacaaaaatgtgcctaaattatcagactaggaacacccccatgagagaaagtggctaaatggggtatcttcctgaatgggcaggccacctcttacctgggtattggacaaggcccctactccagacgattaatcctccttcccaccacaggctcactctttgcattcttaggcagttatgactctgtaaaaatgcaaaagtttctaatgcttcagttgcggttagctttttgtagttaaaattttagtaatcagttcataggctaaagctttgctaatcaaagtctgatttattgattagcaatatagtataaccagtgaacttctttgaaaatagaatctcaagactacctcagacctgcctataattagcattttaagatttccagatgattcatatgcatattcaaatttaagaaccctcccctaaagagtattagaagaaattagatttaaaagagatatctgaggaagataaatagaaacaatgaatgaatgaatgaatgaatagaaagatgtagctttcatttgttttgctttacaatttgcttttggttggtactgatttaagtgctttagtaactattaaagtggcattcagggctcattctagagcccaggatcataatcactcattgtgcacaatatatgcctagtacttcacacattgtgggtgctctaaatgtatgttatctctcttttcctttctaagatataaaatttcatagtagtagtattaaaataagaagaaagttataatgcaatggaactacaacacaataattataacgtaataaataacccaattgaaaaatgggctgagaaagaggcagagcaaaatagctgaaatgaactccccagcaatcgtccccttaacgccccacaggataaccgagttgaacaactgcccaggcaagaaagcaccttcataataaccaaaaatcaggtgatgatcacagtgcctggttttaacatcaagaaaagaggcactgaaggctgggtgcggtggctcacgcctgtaatcccaccactttgggaggccgagatgggctgttcacgaggtcaggagatcaagaccatcctggctaacayggtgaaaccccgtctctactaaaaatacaaaaaattagctgggcgtggtggcaggtgcctgtagtcccagctactcaggaggctgaggcaggagaatggtgcgaacctgggaggcggagcttgcagtgagcagagatcgtgccactgcactccagtctaggtgacagagcgaaactccatctcaaaaaaaaaataaaataaaataaaaaaggaaagaagcactgaagagggtgggaaagacagtcctgcattacctaaactcttccccacctccccactagtggcacagcatggcacagagagagaatccatgtgtctgggagagagagagagcaaagtgattgtcagactttgcattggaactcaatgatggcctatcatagtgaaaaacaatacagggcagaattctgccagcccccatggagggagcatttagaccagcctcagccagaaggtaaccctccactgcagcagtaggaacctgacttccagctagctctaccattggttgactacagtgctggggtcctgaaaaaatttgaaagacaggcctcagggactacagtacttgggcaagtactgatgctcttctgggcttgcaaccagtggacttggggtgcacgtgacccagtgagacaccagcggtggtgaccaagggagtacttgcatcacccatctcccaactctgtgcagtgcaacttggggagagacttcttttgcttgggaacgggagaaggaagagtatagaggactttgtcttgcaacttgggtaaccagctcagctacagtaaactaaagcaactagcagactccggaagccctctcctgattccaggccctggctactgaacagcatttctagacccaccctgggacagaagggaacccagtgcgctgaagggaaggacccaggcctggaaggattcaccacttgctgattaaagagccctcaggccttgaataaacatgagtggtagccaagaaatagtcaccacaggctttgggcaagacccagtactatgctgacttcaggtgtgacccagcgcagtctcagctataggaaagtaatttatcctcccttggcctcaattttctagttttagaaagtggattatactatcacccacaataatagatgtgtgtgtgtgtgtgtgtgtgtgtgtaatgtcaatatatgtcaaatgcttagacactacctagcacataaactttaggaaagttagctctcatttttatttgttctgttttgtttctgattttactgttatatagttgtaaagaaaaaatgtggtatcctaggtagggtaaaacattaatgtacaatttaacttagggaaatttaatgtccccattatattgagtcttctgtttcagagcaaattctttccatttattcaagtttctttttcgatctttcagcagaatattcttctcataaatttgttaaaatttattcccaggtattttatcttttcattgcaatgtgaatgacattttctagtttgttatagtgtgtgtatcctataaacacactatataaaacatattaaaaatcaagaaacattggttcttgatatttaagtttaaatcattaaacttactgatttgttttatcatatggtttagatgagtcttttggaacttcctggtttacaattaaattccaatatatggtgataattttgcttcccttctgataattaaacatcttgtttctctttttcctaattgcagtggttgatattttcagaacaattatcatttttcaattgaattatcattgtactcctggaatgaaacacaattggtcatggtacattattcccttagcttgctgctaaacttgttttgctaatattcataagtgaggttggcctatggttttcttttttgtattatggcattagtttccaaggctgccaataacaaatatcacagactgagtgaaatgtatctcactgtacattacagtagagttagattagaacacagagaccaagatgccagacatgtgcacacacagagatatgaccatgtcatatctgctactgctaccatggcccatctgctacttatcacttgttcatgtacaactatacatttctgtacaacagaaatatattttctcacagttcagggcaatagaagttcattatcaaggtgttggcgaatttgatttcctctgaggcctctctccttggtttgcagatgcattcgctgtatgttaacatgctcatatctctgtgtgtgcacatgcctggcagcttggtctctgtgttctaatctactctttttatgaggtcacttgtcatattaattaatgcctaccctaatgaccttattttaacttaattacttcttcaaaggctctatttgtaaatagtcacatcctgaggtattatggggttagggcttcaacacgtgaatttcaggggacacaattccccatagcaattatccttgtcagattttgaaataaatgtcatgttgaatctgtaaaaataatttggaagcttttctctgtctctttctgtctctctctttctctgaatctgttatgtagcctgatgttgtttttatttcacacaatgcatcaatattaccttgtctctgataagtctcccaaaatttcacaggcagagaaacaagtcctgtttctgtaggagaccaccaatatgcacatctcagactaccataatttggatatggaaaacatcgcaagggccaaatatgccagccgatgcacatcattataaattattgtttcaatatcaatctagggaatgtcactaatgattgataggtattataatcaccattcattgtcattaactttataggtttccatacttggtttttgtagtcatgtgcagttccacaatgccaaaacttgatataccttcattttaaacagttaagtttctaaaagtaaacctttcttttacacatagtcttaaatatctaagactcaatttaagaacactgcatattctgtggcattcgaaaatggtttcctcgggagttgaaaccataaactctataccccattactgagtgtgccctatgttacagaatactccttattaaaggtgaaaaagcaatctactactctgcaggcttttggtctggagataaacacaagatcatagatcatgtattattatcagttattttaaggtctcagagcaattctttaaacatgtatcaattgtaaggagtaatataaaaggacgctagcttgtcaatttctttttgtcactcaggtctttggcatagactctgttagctttattaaacattaagtattgctttcaggktgaggtagaagagcataagcaagaaaagctttataggctaataaaaatgtaaatgagatgttcatcagcttgctgccctggaaaatgatggaagaaacattacctgaaaaattagattcaacrattattgctaaccaaatcaacctgatatgagaaatccctttgtaaccatttgtgttaatttgcatccttatgtcaatctttctatgcactgaatttgcttccaacatcctaggtcctctrtacatatatatgtagataatgtatatacacatttttatatatacatagaaatatatacacatatttgtataattcatgttattaattaacatgtattagctaaacagaaatatttctgttacatatttgcagcagttggtaagaaacgcctatatattttaattcgtctgcacttagccttctttttgcacaccatactccttacaaggaatttgaagactgagttgtaaatcagaatttctatagcttgttaaagtcacatcctcagagtttggaaacctctgagctcactatgtctcaggaagacgggaaattcttcttctwcttcttcttccccttaattaggaatacattgtaataataatattttctatgtgacctttgaatacagtagtaaaataacaagtgggggctacttacttttctcagggatgattcatcctgggatggtgtttagacagtggcctttgagtattggatattctataaacatcgtgtgagttgttcttcttgatgactccctttagtggatctccgaagaccctttagaagcttgctgagggtgggatggaggaagaggctaaagcccccataactgactctcagcaactgtcctctctcacagaatctctcttttgcggtgacccttaaaggcacttggcccatctgctacttatcacttgttcatgtacaactatacattaggccaatatattaggttggtacaaaaataaatgtggtttttgccattatttttaatctaaaaaacctgcaattacttttgcacaaacctaatagttattgtaaaggatggaacttttaagcaaggcacacaaaaccttctaaagtcactctgagaagcaattcagagtagccccttgctgcatctttcattttgcagccattttactcttttctctgccctaaagcagatctcaggttactaactaacccatttatgccagaggttgcacatttttttgtgtgaaaaatcagaccttggcgatgaccttgagaagtaggatataaataactcccacaagcttagcgttccaataatggaacactaggcataaatgggctaactccttcagctctgggctgagtttctcacaattactgcagatctccacatctgggcaggtcctgacaatagttaaagattttttttctcataatttgtcctgaaaggacatatattgagctattcaggagacttgagaaaagttccaagttaaataggataaagggcaatggatacacattttttgttcagaaatataaagattattcttagttagaggtgaatatgttccttcactgttctctgaattcattctgtcattctgctcctggacttcctacaatagtaccttgacttataaggcccgtgtccagatcttttacagtccacttcattcaaaatgctcctgaaaaattcaagggactcactaacacatggctttggtaaaggcattctcctgaacaaaaacctttctgacctcaaaatacacctagcaagggatttagtggtgataatctagctctcctaccttttcagccctggatctttatgctctttatcttgcaaaacatgctctaaattaaattaactgctacccatttgtatgccccgtgtttctacaacactatagtctctttatggttcaccttttctacccatccccaaagcccagatgaaatgccactttcatgaaactgttggatccatctatcctgaagtttttctatgctctgaacaaccacaatgtttttttgtacctttctaataacatgtaacaccacctgtttcatgagcatagttttatttgattattttattatactcttttttgagcacaggaactgcacactagaaatcatcatatttctcacaggttccaatattgtgatttttgcatacagtagatttttaataagtttctgtcaaatgactaaactaataattattcaagtgttttaggaattaaacagaatgaggaaaattatttctactctccataaaagcagaagagattataatgatacgtttcatgaagaaagtagcttacaaaattacaagcaattttcatgaataacttcaaacaaattagtcttaatacctataaaaagtatcacagccttaaaaaaatgatgacaattaagtgatgtcagcagtatggcagaataggtgtttccattgcttgtcatctcacagaaatatcaacttgaagaactatccacacataaaaataccttcacaagagctaagaaattcagatgagagattatggcatctgaatggagcagagaaatcagcaaagacacattgaagaggacaagaatagttttacattatgcatgtcaccctttcctaaagcctatgcagttcagtacaaatagagatagcctccatgtaaaggaaaagaataaagtgagtccctaacttcattgcaggccccagcaccatgcctaccccagtggattccagaaccaggccagtcctcatgtccccagacctctctctggcccccatggacccagcatccaggcccatgtcgctgccaaactagcccctgtagcctgtggcctcaggcctcaggctcattctaatatcagaccagccctcacagctccaggcctgctctgggccaccccagtgccaggaaggcccccataagtcaggctgcaggccagccctagtagtcccaggctactagggactagagttcatgtaagccctcctacatgaactcaggtacgaggctcattcatatggacccaatgtccaggccctccccagtagacccaggctccaggcttgcccctacaaaaaaagacatcagattgacccctgtggacttaggcactaggcccatgaacccactgacctaggcagcaggccagcctgcctgaggactcccgtggcaagcccactgcaaaccccaatggataacctggtcagaatctctggacaagctgtctggtgaagggctttccttgccagtctgtaaagactggaagaagtgtctacttcaaatgcacagataccaatacaaggccacaaggatcacaaataattagggaaacatgatgctacccaggaaacaaagcaccaggaactgaccctaaggaaatgaagatttctgaactgcctggcaaataattaaaaataatcaccttaaagaggctcaatgtgctccaagagaacacagatatcagaagttcaacaaagaggtagaaaccataaaaagaaatcaatcagaaactcagaagctaaagagcacaatgattgaactaaaaaatttcacagagaacttcaacacaaacttgatcaagcagaagagagaatcagcaagaaaaaaaagaaactaaggaaaaaaacaggtcatttgaaattactcagataaacaaaaaggagaaaaagaatgacaaacgtggaaaagcctacagcacttttggtacatcaacaagtaaaccagtgtatgcattattgaggtccaagaagaaacagagaaagagaaaggggaagaaagcttattgaaagatatcatgacagaaaacttttcaagtttggaaagggaaatgaatatccttatccatgaagcccaaagaaccccaaagatacagagatattcactgagacacatcataattaaattctcagaaatcaaagacagagaaagaattttgaaagcaccatgagaaaagtgactcatcacatatataagggtataagaatatttattcaacaaaggtggcaggaacacacaataggaacaggacattctcttcaataaatgatactgagacaaatcaactcaaaattgactaaagacttaaatgttaagggctgaaactttaaaactactagaagaaaacatagagaaaagcctttttgaaattggtttgggcaatgatttcttggctatgacctcaaaaacacaagaaacaaagcaaaaagagattaacaggattgcatcaaactaaaaagcattggcatagcaaaagaaacaatcaacagaataaagagacaacttatgaaatgggaggaaatatttgcaaaccatacatctgataaggggttaatactcgaaatatataaggaattcaactcagcaactcagtaaaaggacaacaaatattccaatctaaaaatgtgcaaaaaacctgaaaagacatttctcaaaaataggaaatacaaatcgccaagaagtatatgaaaaaaatgcttaatatcgttaattatcagggaaatgcaaattaaaactacaatgagatattaccccataccattataaaatggctactatcaaaaaggcaaaaaatagcaagtattgacaagaatatgcagaaaagtgaaacggtacagcagttatggaaaagagtataaagattcctcaaaaaattcaaaatatgactaccatgtgatccaacaacctcatttctgggtatatattcaaaagaattaaaatcagcatattgaagatatatctgcattcccattttttaaaaatggtgtctcattctattgctctctcattcgtattgcaacattattcacaatagccaagatgtgaaatcaaccaatcaacctaagtgtccatctatttatgaatggataaagaaaatgtgggtatagaatagtatacatatcatatatgtgaatattatttatcttaaaatgaagaaaattctctcatttgcagcaacatgaatgaactgggaggacattatgccaagtgaaataagctaggcacagaaagacaaatgcttcatgatctcacttacatgtaaaatcttaaagccttaaaattacagaagcagagagtagaatggtggttgccgggggctggatgtgaagaaacagggatgcgttggtcaaaggatacgaagttttagttatgaagaatgaataaattctggagatctaatgtacaatgtagtgtttataattattaatattatgttgtatactttaaatttgctaagagagtaaatcttaaatgttcttaccacaaaaatttaactatgtgaggtgatggatatgatcattaggttggttgtggtaatcacttcacaatgtatatataaatcagtcaaagcatcatgttgcacaaaataaatacatactttttatttgtcagttatacctcaataaaggtggaaaaataaatttttaaacactgaatataggtaaagctaaaagttatatgtggggatatggggaaagagtgtatgttgtggcttggagcaacaagtaaaaggattacatcttcatcttccacatagtgtggttaaacagaaaaaaaataaatattaaaaaaatcaattatttttacattgtgtatataaatatccaaagaagcagctaaattagtcaaagtgcttatctttgggaaataataatggaaggagaagtaaaccagagaactttgtttttcaaagttgaccttgtagaaccatttttgacttaaaaaatggatatatgctgttttgatttttaaaaattaattaaaaaatgatgatcacattttgtctttaaaaatttttgtttaaaacgtatccatttcttctccccatttaatatatcttttgaccatttaaagtataaaaaaagaatttggacttaatctaatgaagaagtttgaccctaacaaaagagagtaatggggtttaaatttatgccactctacaaaaaagaagtcgaactcacccataggtagtgtcattagtcttttaggtctgcatgcctctctctatgacttttcccaatctttgttttaatcaataatcttgtctccagtctaacatgggaattgtgctctctggcataaaatgggctactgaattacagtcctgtgctatatcacacagccttgccattgatagcatggaaatacttcgaaatactgctgtcaaaatttgcaaactgtcaagataaataagttcattcagattatttatatctgctgtttctccccctaacctcatacttagaaaattatatgtgtctagtccttctccaacttgattttatgtcttttagcctaatacattggcaaaccaaatgcatgactctgacaccgataatactaagaagggctgaaatgaattgttagaatgagagacagtcactttgtttagaagggagtgctccatgagcagtgtgataacatagctccttgaaaatctagtcaatcaccattttatagtaaaagcctatgaatttttgtagcttggtgtcttattgtctctattcaatagttgcttctaacttttctgggcatccccagaaaagtggaaacctcctgtgaatgaggcaaatttagtaacctccaattaatcaagcacactaagcacataccacatctgcaggaataaactaggtatgggattaaagagatgtatagaattaattctttgcttaatgtattttgccattctatatttcttttttttttttcaagagagcaagtctaagtcctccctggagaattgttgaaataatgcctaatttaggtaactaagcattttaagcctttctacacttttataatatttgtaattgaaaaaaacccagcaccaatatataaataattaatttacctttgaaatactgctgtcagaattatgatgcaaactctgcatcacatttttgcataccttttaacccaggaaattcacttctagaaatttattttacgaaaataataagagattgaattgcatgggtgttcatgcaaaataaaaaagtaaaatgctctaaatgcccagcattaaatattgattaaatcaaaacagtgcatggatatggtgggacactatgctatcattaaacatgacattgtacaagattatacattgacatgaaaagacacatataaagactttgtgaaacatgtataatgttatttaagctttgttgtgacactcaagttttttctttctttttagtttttcttattactagaatgaatgcattttcttaaatattcacctttacagaagtgactacacaattaatggctacacacctctccccacttatttctgcccaaagacaactactgttgacattttggtggatattctcctaggttgtttcatgtatgtctttttcaaatgtaggatcacactaaatgcttctgaagcatacttttcttatttaaaaaatacagcagacagcttctaagtgtgcaccatgttcttttgtaaacatatgtattttaaatatatgcacacacataaagagagagaaagaggctgtttaaggagtaattgttaagtggatatgcatgcaacgaccaccagtttaagaagtaatttctagttccccggagaatcttcatgagaacttctgatttcatatctgtctccttcttctagagtaatccctctctctctatggtaactattcctttgctttcctagatattaagtatatgtaaatgtatgtgtaactctgtgaatatgtatctctgtataaaatcattaattaaatatttttaattttttctgttcttgaactttatgtaaatgaaatcaaaggcatatttttgtgactttattatttattgtgacttctttgtgagtgatcacttatgacattttaacaatttttttatgcatgtggctgttacatagccacataatatatgtttacataggtcttatgtacaagggaaggttctaagcacattatacagattatcttgttttatgtcgggaataggtatcattattcgtttcattttacagattgggaaactgagttccagaaaggttaaataacttaatgtaggtcacacagctagtaagtggtgtagattatattctatcctaagttgactgacttcatagtctgtgatcttaaccatagttccaacctgctttctgttacagatgagtatgctacagatgccttctgcttatttagggttaatgctttcatatattaagaatcccccaagactcaatttcataaagatattttaaattattatcttaaggtttgatggtttgccttcagtatttaagtgctttacctacctaatattgattccagtctatggtacaaagcatgggtttaacttaattttttgacatgttcaattgtctcaacaccttttattaaaaagcttatattttccttattaataatatacaatactaattctgtcatatatcaagtgtccatttaattgcaaatctgtttctagatctctgttctgttcatttatctacttatctagtcatgcaacatcctatataaagttgttcagaatagtctcttaataattttaattttctaccaatagtggcatattcttttttattcctgatactgattattttggtctctctttttgtcggtcttatcagaaatcagaagtttagcaattttgtgtctttgcaaagaaccaacttctggctttgttgaatttctctagtattatatgtttgtcttttttttaatcaatttctgcttttatctttcttaacttcatataatttcactactgtttttctaatttcttaagatggatgcatagcttagcttattaatatttagccttttttttctaacagcattttaggctacacatttgtaagttctgtttttggcacatttaagttgtaatatattttgttactgttcagtttaaaacatttttccttctactagaaattctttttggacccataaattatttagaagtaggtttccaactttacaaacttagtgtttttaaattaccttgatattgatttttaagttagttgtactgtaagcaaagaacttcgtcattagttttccagtatttgaaatgcattgagtgctgctgtaagggccaatatttagtcaattttgtgaatgttccctttattcttgaagtgaatatgcattctgcagttgtttgctacacagcttataggtacaaatttgatcaaggtcttaattgtgtccttcatgtctttcatatctttattgtttcttgttggctttatcaattttgtgttaaaaatttttcaccatgattgtagatcttgctgtttattgttgtagttctataaggttttgcctaatatattttgatgytatgtgttattgatataaaatttaacatggtttatagtttcccagggtgaattaatgaatacattacaatagattgaacttctctatctctagcaatggtttactttaccca

SEQ ID NO: 4 - DNA, 200620 bp, Homo sapiens
atggaggcggcagcggcggcggcggcggcggcagcggcagcggcagcggcgggcgggggctgtggctccgggccgccgccgctgctgctgagcgagggcgagcagcagtgctactccgagctcttcgcgcgctgtgccggcgccgcgggcgggggccccgggtctgggccccccgaggccgccagagtcgcccccggcacggccactgcggccgccggccccgtggctgacctgtttcgggcatcgcagctgcccgccgagacgctgcaccaggtgggtccctccgcctcctgtccctgcgggtctgtggggcagtgtgtgcgggggcggaggttgcgagtggggcgacagggctgcccccagggacccggaggcctcggccagttctgagagagaggactctgcagccggggatggcggcgacgcccttgtccccgggggacaccagcctccttcgcagctcagctcctcgcccagtgctgggtgcgctctccccatcttccttccctgagacagtctgacactctctcccctcccccggccatttctggggttctgcagccgcccagacccaaagtttgtcctgttctggaagtggtgtttgttttggctgctgcctggtttaacctctgctcgctgctcctgcccctccctctcctgagtgggttctcagggtgccttgctgggatttcaacttgaagggtgtgtgtgtccgtagggttcgaggcccagggctgaatgttgtcctctctatgtagttgtaatatataagtatctactatatgtaattgcccataacatatttctaaatattaatattaaatcgaaaaccttaatgacaagttgcagaacagggacacgggactgcaagaggacgtttgtcaagtcaaaaccaaatttcccatttgagattagaggtggacttcagaagtccaccatgggaaacagctgtagtttcccatctatcattacttggacttgaaatagaattgaaaggtaagggatgtcatagctaccaccttttggctgttctatacttggaaaagtactaggggatgatacataccagacgctgtttttgttttgtgctttccttggagcttggagaaagactacttgataagcctttgtctgtcatttcatgtcaccagcacttcatggtgataagactgttaatatcaggttcaaaacgtgaaatgaagcttttcctaaaagcaatagtatgaatgttattaacaccaatggaatatttagagtggcgagtggtattttaaaatctagtttcaaaggagaactgagggttttatggttcacttgcaatgtcattgtgttcatacgtatttttaaaaaaattgcttaagactgcgttttatactgctggagtgtttttactgctatatgtttgtgagcataactttagacactttgtaatctttcacccttttgaatttgggatttctgaaactgtaactagtattcacagaacttagcatggctgtttatccctaaagaagtccttgatatgtagacagttctgccattgctgatgagtagttgagctggatcaggtaaagagaaagtcagtgtcttaaaacacaaaccgtggctattacatgaggccctcagaatagtcccgagcataatacatttattcagtgctgtagctgcttcccagctgaaagaggaataattgactgaggctatgcagcaagtaagtgacagctgggtacctattaaggcttattttgttgtcagtaatgcatcggataagaggaggtgggcatagtaaatctgaatatgttggttgatgcctctttaggaattgggaagaaggatttcctgatgttagaacccatgctttcttgaggtacatatagttttaaaaggacccaaggcacagtggctgtgcgtgaatgagattatatttttgatgtccagttgaaatctgcttgcaaaagactgcttcagatactggcaaaaggggacatccctgcgagattgcttggagtaaatctctcagagctcgaagctcccttattcagcctagcaaagcaaaacacatcatccacctttaatccaacaaaattaccataactcaatattcttggtacaggtgaaaatgaacattgaaggcatcctggacatgtgatcctaagagagtcaaacaaagtcagcaaccagcagacacctaattttcacccatcactttggtggtggtggtggtggtggtggtggtggtggtgtgtgtatgctccatccactttaatttgcattaccccatcagtgtattagccattctttaaaacaaacgtagatgtttttaccctttctctgttaaacaggaacctgtaagttgagatttaagtgccccaacaggtataactgctcaaatcttggaggcactaaccagtcctgatattttctatggtaacaaccaggttttcctcttaataagcatacaattaagattaccataataatgttccaggaagagtgagaatcttgcattcttaccacaagtaaatggtctataaaaatacttattttttatttatttattttttgagatggagtctcgttctgttgcccaggctggagtgcggtggcgtgatcttggctcactgcaacctctgcctcccgggttcaagcgattcttccgcctcagcctcctgagtagctgggactacaggcgcacgccacctctcccggctaatttttgcatttttagtagagacggcgttttgccatgttggccaggctggtctcgaactcctgacttcaggtgatccacccgcctcagcctcccaaagtgctgggattacaggcgtgagccaccatgcctggccttaacatattttttaatagactatttttttttttcagagcagttttaggttcacagcaaaatttagcagagtacccatatatcccctgccccgacacacccgtagctttccttactctcaacgtcccacatcagaataatagagtttttacaattgatgaacctacattgacacctcattattccccaaagtctatatattagggctcactcttggtgttgtacattctgtgggtttggacaaatgtataatgacggttccaccattgtagtatcatacagaatagtttcactgctctaaaaatctgtgctctattgattcatccctccctctccactaacatgtggcaatcactgattttttttttttttttactgtccccatagttttgccttttttagaatgtcatatagttggagtcatacagtatataggcttttcactttggcttctttcatgtagtactatgcacttaaaattccttcatgtctttttatggtttggtggctcatttctttatagtgctgaataatattccattgtctgcatgtactacaatttatttattcacctactgaaggatatcttggttgcttccaagtttgggcaattatggataaagctgttataaacatctgtatgcagccttttttgttacatgcaggagataagcttttgactcatttgggtaaatagcaaggggcatgattgctagattgtatggtgagagtatatttagttttataagaaactgccaaactgctttccaaagtgattgtaccattttgcgttcccatcagcaatgcattggtttctttacagagtatttattttcctttgctgacttattttaacagcaggattctagcactaggtggaaaacgtatatgagtttctgatgtgtgtcaggtactgtcctaggtgctgaggttataatagtgaatccaacacaatctctgtcttcatggagcttatgttctcatgtgaatgtttttacacttcagagtttttatttggttgagaaaagacttgaaatataacatccaaaaataaaatgtcagcctggtgctgtggcgcacgcctgtagtcccagtgctttgggagaccaaggatgggaggattgcttgaggccaggactttgagatcagcctgggtaacatagtgagaccctgtctctacacaaaataaaatagccgggcatggtggcatgcgcttgtagtcctagctactctggaggctgaggcaggagaattgcttgagcccaggagttcaaggttatagtgaactatgatcgcaccattgctctccagcgtaggcaacagagcaaaaccctgtatcaaaataaagtaaaataagcctgtcaaacccaaaccaaatacatgtcaaacccagacctgattcttaccacacactatgccttctagtaaaattctggcctttgaataccaacaaaatacttcataacctgggaaaccaactactctaacgtttgttgctctgtcttgaaatactaaacaaaaccatttacctgttcgtagacatattttctttttctagtttaaaagtatcccattctgccattttccacctagtgctagaatcctgctcttaaaataagtcagcacagggaaataaatactctataaagagaccaaaagacctttcaaaataggctatggccaggcccagtggctcacgcctataaatcccagcactttgggagtctgaggtcggaggattacttgagcccaggagttctagactagcctgggcaagatggcaaaaccccatctacacacacacacacacacacacacacacacacacacacacacacacacacacacacacacccccgctacctacctctctctggggcatgcctgtagtcccagctattctggaggctgaggtgggaggatcccttgagcccaggagtttgaggctgcaatgagccattatgacaccactgcactccagcctgggtgaaagagccagaccctgtctcataaaataaataagtaaataaataaaatatctaccttaaagcagcaagttttgtatttgatgtaatgaattaacagaccgctttataatatctatcttttaggatagtgtcagtctcttggaatgctgtgcatgagtcatcattaaaattggttttcattaaaaaaatttttttaacatatacacatcttattggagttttcttttaaaattcaaaaatgggaacattattttttcaaagccaagtaacagaagagtatataaaaaagtcaattttgtgcatatctttttacattttctatgctcatgtaaaacatacatgacttatgtaattatacacatatgctccagatctcatctgtattaattttttaaattatactttagttctgggatacacttggagaacgtgcagttttgttacataggtatatatatgtgccatggtgatttgctgcacccatcaacccatcatctacattaggtatttctcctaatgctatctctcccctagccctgcacccctgaataggccccggtgtgtgatgtttccctccctgtgtccatgttttctcattgttcagctcccacttatgagtgagaacatgcggtgtttggttttctgttcctgtgttagtttgctgagaatgatggtttccggcttcatccatgttggttttcatttttgtgatagttaattcttggacattaaggggaataattataaaacactgttgcttccatatcaagggaaatcactgaatgattaaaaaaaacccaataagtgttgtctgattgtttaaacagctttcattgaggtaaataagtaaaacaaagctgtgagaagtagggaatatttaaacaatttgtgcgcatgccctcacctttggggagaagtcttttctgaaggctctcttctgattttttgaagcaactgtttaatcattaaagaaaattataggtaaaagacaaattcttgtgaactttcgctcattgctagattattaggcagaactattttttaaaaatttaaatgaaacaactttatatttttacatctttagatcatatcattttgtaactatactttagggaaatagaggccagcatattaaaacagtaactaggggctgggcagggtggctcattgcctgtaatcctagcactttgggaggccgaggcgggcagatcagctgaggtcaggagtttgaaaccagcctggccaacatagcgaaaccccatctctactaaaaatacaaaaattagcaggagaattgcttgaaccggagaggcgaaggttgcagtgagctgagatcaggccattgcactccagcctgggagacaagagtgaaactctgtctcaaaaacaaacaaaccaaaaaacaaacacacacacacacacacacacacacacacacacacacacacacaaacacacaaaccagtaactaggactaactatatgctgttttagattgacagtattctttttttctaaaagagaatgaatgccagcagatgtaggaagtaccagagctaaaccattgcctggttaaaaggagtacctctgcataatagttacttgttgactcttttgtaataaaatatttcaggcatgtaaaactagacagttacccaagaaataactgtgtatccaccactccgtataagtaaaacagcccagctagagtgaaagcctgctatgtccccttctctggtcccattcccctccctccctaccctggagttaccagagtcctgaatttggtgtgcatgatttgaagatttctttctacttttattgtatgtatatgtggatatatatatttgtgtatatataaatcactaaaaaagatattattttggatgtcttttcaacttaaggaatatcgtattctgtgtaaccttctgcaacttgcttttcctctcattgttttgtttttggaattcatcttgttgacacatgtaatttcagttcatttatgtttccttttaaaaaatctttactacttacgtttacaatgactcattgttacagtgcggtagagacccttatgccaaaaggaagtaggtggcatttttccttatttatatagaatgtcacatgactgggggactgttcgaaacgtgtatgaaaattaagaacaccttcatagatagcagaatgcacacttatattcttgagcgtgctaggggatgtttgagctaattaattgactttcatgggctttctttttttctcatcttttatttttttgagacagggtcttgctgtgtcacccagactggaatgcagcaatctgatcatgactcactgtaccctcaacctcctgggctcaagcaatcttcctgcctcaggctcccgagtagctgggaatacaggtgtgcagcaccaagcctggctaattttctttttaaaaatttgttgtggagatggtgtctcattatgttgcccagcctggtctcaaactcttgggctcaagtgatctcccgcctcagcctcccaaagtgttgggattacaggtgtgagccaccacaccctgccatttttcatctttttaaaaatggaacatctcaaataagcaagtagatagaataatgcattaaaccctgctgcacttgccactcaggcccaacaactgtcaatgcaaggttaattcaattccatctacatttctatctttgttccctctcacctttgttatcctgaagcaagtcgcaaacatcatatggttcatagggcttatctttaaggaaggaaccagggtgggcagaaggaaatggaaacatgcaggggtttaggttggccagaaaaggtacctgtggcctatggtcaaatggcaagactgatgatggttcaatactgtcaagcctttggctgtcatggagatagacgtgcttgagaactgatttagaatagttgggaaacctgtagggagattgaaaaagtaaccaactgaagaccaggaatacaagatggatttgaatattgttctagcttcacactcctaagtaggggctgtcctattttaagggtgtagacaattggttttgaggaaatcttgggttgtttttgctaattatttataactttttttttttttttttttttttgagacagagtcttgctctgtcgcccgggctgaagtgcagtggcgcaaggtcggctcactgcaacctccgcctcccaggttcaagcagttctccctgcctcagccttctgagtagctgggactacaggcgcccaccaccatgcctggctaatttttatattttttagtagagatggggtttcgccatgttgactaggctggtcttgaactcctgacctcaggtgatctgcccaccctggcctcccaaagtgctgggattacaggtgtgagccaccgcgcctggcctatttataactttaaaaagagggtttggttcctttccagggtttttcaaactttctgtttgtttcgtataggcaagtttctcatgttttgtattgatggcattctattattcatacctatctgttggtgggcaactaatcaacctgggttgcgcaggactgaaggatttcctgggggcatggaacttcagtcttcagacagtcctaggcaaactgggatggtcaccccctctcttggttgctgcattagttatctattgctctataatgaattaccacaaacttagcagcttaaagcagcacacagttattatctcccagtttctgtgggttcgggagtctggacatggctcagttgggtcctcagctcagagtttcataaagccacaatcaaggtgtctggagcttggagtcctctgtggaggtccaacacttggttgcagaattcagttccttgtgattttagaactgaggctctcaacttcgaggcttcctgcagttccctccacatggccttctccataggcaattcacaacatggctcttggcttcttcaaggccagcaggagagtgtctctctccagttagctcagacacctttgccatagtccattagttagaagcaagtcacaggttttgtctgctctcaaggggaggggattatacaaaacaacagagaccaggaggtgagaattttgcgggggacaccttaggatctttccaccacacttgctttccaggatttgtctgaagtagaaaattattctgttgagcctttttgtggccagaatatacatatgttttgctcagccactaatttagaattcctttatctttttaagaaacattttcatgcgtaattcatcctaagtagaactggcaaatatgtaacttcttaggtattttcaattttagtctttaggcaattgtttttcctcttaactagtaggaggcaggaaaaaaaagtggaaaagcagatgcaaatgccctgcctggctactcctgcacgcagtgctctaaagcaggccttctcagcctgggttagttcaggggtctgtgaatttagatgtggaaaagaactacatctttttttttttttttactaactgcccttcccccaactgaaattgagcacttccttctattatgcatgtaagcaaaaaaccacagcagtttttttttttttttttttttttttttttttttttgagacagggtcttgctctgtcacccaggctggagtgcaatctcacaattttggttcactgcaacctgtgcctcctgggcccaaatgatccttccatctcagcctcccaagtagctgggactacacgtgcatgccaccacacccagctaatttttgtattttttgtagaaacgggattttgccatgttgcctaggcaacagggttcactgctttcggtcaaatgacagcaatgctgctggcaagtccatggtcaggagtgagattccctcaggctgctgtggtccctcctcctccagtctgtcctgcaggaagctcagagtgaatggatgctcagctgtttcctctgagacctcaccagggacagttcctgcagtcccggctctgagctctgctcctgaccgttttatctggccctctcagctgtgcttcactgcaaaggaggaaggacaaggccctctggagccagtgccagctgcttgtggggcctgttttatttactactgctatctctacttcagagacttgggctaggacatagacttgaagaaaaaagccattttaacagacttgagaaactcagccatcctcataataccattcagaaccaggagaggccattattaacactaggctagtaggaaatgttcactttgactgaattcatttgtaacactttgccactggtttacaagaaaaatactttggttcagtctcctggaggtaggtaattaaatgtttcacctgtgctaattttccaaataattaaagtgaatcccataaatgccagcaattaagaattgttgtttttggccaagtgtggtggctcatgcctgtaattacagcactttgggaggttgaggcgggcggatcacttgaggccatgagtttgaggccaacctgggtaaaatagggagacgctgtctctacaaaaaatacaaaaatcagctgggcttggtggaatgtgcctgtagtcctggctacttggtaggctgaggcaggagaattgcttgaatccgggaggtagaggtttcagtgagccaagattgtgccactgtactccagcctaggcgacagaggcgagattctgtctcaaaaaaaaaaaaaagttgtttcttaagtgcagaccttctgagatgtgtagtgcttgccccatgccttcaaaagaacatatttaatacaataatctctttgtctctcctttacttcaaagtcagccttgtgaaaaacagatgatgatataccaacagttttttgctcttggaggtgtttggtgtgctctgctttttgagttttgttttttggacttctttaaaattattttaaaatgttttaactcctctcctttgcatactctctggtacccttatagtcccaatactgagtaaagcatgtaaaatttagcatgcagatgttttagcctcttttattttttgttcgagatccagattttttagtctcagcatgactgacactttggggctgtatcattctttgttgtggaggactgtcctgtgcattgtaggttgtcaagtaacatccctggtctctacccacaagataccagtagctattcttctcctgattgtgacaacaaaaaatgtttccagacattgtcagatgtctcctcggggcaaaatttagttctacatatatgatgataaaaaccatggtagcagccaacatttgttcactatcatccccattttgaagaaagcaaaaacggaggcactgagggtgaggttcacttacttgcccaaggtcacatagataaaagtcacttcttgaaatacttttcataatatatatgggttgaatctcagtcttaattgaggaggcagactaaaaaagaatgtaaaaacggggagtttcctgatgatgtctcaattgagaggctattgctttcatagtgattctgtgtaaatgctggaattcttgcttaaacggggtgattccatgggcatgtgtctgagtaaaggacttggatcatttctaagaagcttctgtggcatggtgaagcagaacataagacagtctaggatcaaggataactgatcaaactttgaaaccaaggaagccataggaaattggggtaaggctatgtatcacttagggtcccacaggaaatggcatgctcaaagggttttagtgaaaacaggaatgttgaggcacgaagggactagcagcaggaagctattgccattcctagacctggtggggcaaagggaggggagggaatgtcgttgctggagctgtgaaaggtactccctctacaggaacaatagtcatgaaagaatacagcctttgctagaactatggccagagaggggccagtgggatgaggggatgggagagaagtaaccaatttctgtttcctgccctctcatttgctgcagtgccttttgttgttctaacccaactagaagccacaggtaacagagcctgggtgttgaagcttattgaggttagcctcttgcgctgagtggatggaaagggctgagagtggttcaagggggcaaatagagcaacagccagcacaggctatgagcaggagtgggaaacactaccctggatcctaggaaggatggggcatggccagtgataggagcaatgaaagtctttttgtgtgaaaaagagcctggggatacagacctccatgaaggagaagagagggttggataggagtgactggttcatctgaggttcttcctatttctccaaggaagccttgaggaatgtggggttgtctgtttgcatttggatatggaagtatgtgtgtgtgtatacttttatttattttgagacagggtcttgttctgtcacccaggctggagcacagtggcaccatcacagctcactgcagcctctacttcctgggcttaagtggtcctcccacccaggcccccccaggtagctgggaccacaggcatgtaccactatgctcggctgatttttaatattttgtagagacagggtctcactatattcccctggttggcctcactcctgggctcaagtgatcctcccaccttggcctccagaagtgctaggaatacaggtgtaagccactacacccagtctgtttgtatactttttggtcagagtgaggctttccgtgagttggagtgtttgtccttattcatgacactgggaaacatacaacagtggagtgaccctcttgcagattctgctaggagtagctacatatggtgggaaaggttgctatgggaatggagataaattcaaggcagtagagagtgctttataatgtttgggggtatggccaagcattagttttgctttttccttcccagtaggatacgatttctgtagcaattcttccttacccaaaaatagctatatgtgctcccaaaaagaaaaagcccaggaccagatgacttcatggctgaattctaccaaacattcaaagaagagttaatactaatccttcttaaactcttccaaaaaacagaagtagagagagtacttccaaactcattttttgaggccagcatcaccctgatttcaaagccagacaaaagataccaagataccataagaggagaaaaccacaggttagtatctctgttgaacatatatgcaaaaatcctaaataaaatactagcagaccaaatttaacaacacctcaaaaagatgatacaccatgaccaaagtggcacttatccctgagatgcaagattggtttaacgtatataaaacaatcagtgtaatatgccacattaccaaaataagaggtaaaaaacaagccaggtgtggtggctcacacctataatcccaacactttgggaagctgaggtgggaggattgcttgaggccaggagttcaagaccagcctgggcaacatagtgagacactgtctctacaaaaaattaaaaaaaaatgagctgggcatagtggcatgtacctctagtccctgctacttgggaggctgaggcagcaggatcgctggagccgaggattttgaggctgcagtgagcactgattgtgccaccgcactccagttgggcagtacagcaagaccctgtcttcaaagaaaaaaaaagagagaaaaacccatgatcatttcaatacatgtagaaatagcatttgacaaagttcaacagcctttcgtgataaacattttcaacaaaataagtttaaaagggaatttcctcaacacattaaagaccatttatgtagagtccacagctaatatcataatcagtgggagaaaactgaaagctttttttctaagatctggtacaaagcaaggatgcccactcttgccacttttattgaacacagcactggaagtactaacatgagctatcagacaataaaaagagataaaaggcatctaaattgggaaagaagaagtaaaattatccctgtttgtaaatgtcatgatcctatatgtagaaaaccctggactccacaaaagccctcttaagactaataaatgagttcagtaaagttgcatgatacaaaatcagcgtacaaaaatcagttggaaatcaagaaaactgtcccatttatgataacataaaaataataaaatattcaggaatacatttaatgaaggaagtgaaagatctgtacattcaacattataaaatattgatgaaagaaattgaagacacaaataaatggaaagatatgccatgtttatgcattggaaaaattaatagtgttaaattgtccacactacccaaaacaatatacaggttcaatgcaatccctatcaaaataccaatggcatttttcacagaaatagaaaaaacaattctaaaattcatatggtgtgacaaaagacctagaatagccgaaacagtcttgagaaacaaaaacaaggttggaggcatcacacttccttagattataatacagtataaagcagtagaaattatgatagtatatcctggcataaaaacagacatatagatcaatagaatagaacagagatccgagaaatatacagtatatatacagaaatccaagtatatacagtcaactaatttttgacaaggccaccaaggagacacagtggggaaaggatagtctcttcaataaatgatattgggaaaactggatattcacaggcaaaagaatgaagctggatgcttatatacaaaaatcaactcaaaatgtgtctttaaaatatacaacaaaacctgaaaatggaaaagaagacctaaatgttaataactcaaaccattgaactcctagaagaaaacataggggaaaagctccttgatatcggccttggcaatgattttttagacatcacaccaaaagcacaggcaacaaaagcaaaaagaaacaggtggtactacatcagactaaaaagcttctgcatgacaaagggaacaatccgcaaataaaagggcagcctatgaattggaagaaaatatttgcgacccatatatatgataaggagttaatatcaaaaatatataaggaactcccagaactcaatggtaagaaaatgaataacccgattaaaaaataggcaaaggacttgattattcattttcccaaagaagccatacaaatggccagcaggttgtgaaaaggtactcagtatcactaatcataagggaaatggaaatcaaaaccactatgagatatcagctcacaccttttagaatggctattagaaagacaacagataacaaacgttagggtgtggagaaaagagaacccttttatacttttgatgggaatgtagattggtacagccattatggaaaatggtatagaagtgcctcaaaaaattaaaagtagaactaccatatgatccagcaattcctctgctggatatgtacctaaaggaaatgaagtcagtgtgtcaaagaggtatctacactcctgtgttcattgcagcattattcgcaatagccaagatatggaaacaatttaagtgactgttgatggatgagtggctaaaaatatcgtgggatacacacacacacacacacacacacacacacacacacacacacacacacagatgacagaatattattcagccttaaaaaaggagatcatgctatttgtgacaacatggatgaacttatgctaagtaaaataagtgagacacagaaggaaaaatacttcatgatcttatttatctggaacctgaaaaaaagagtcaaatatatagaaacagaatagaaccacggttaccaagggtgggaatggggaggaaataaggcaatgtaggtcaaagtgtacaaacttgcagtgatgtaggctcaataagtctagagatgtacagcaggaggactatagttaacaatattgtattgtatatggaaaatgtgctaagagtagattttaggtgctcttacctcttctccccacaaaggtaactatggaaggtgatgagtatgtcagattgcttactggtagtaatcatttcactatggatatgtatatcaaaacatcatgtcatacatgttaaagttatgccataaaaatagctatatgtgggccaggccaggcatggtggcttatgcctgtaataccagcattttgggaggctgaggcaggaggattgcttgaggccaggagtttaagaccagcctgggcaacgtagtgagaaacctgtctctccaaaaatgtttttaaaagttatctgcgtgtggtagtgcatgcctgtgatcccagctacttgggaggctgaggcaagaggattgcttgagcccgaaaggtagaggctgcagtgacctgcgattgcaccactgcactccagcctgcgtgacagagtgagaccctgtctcttaaaaaaaaaaaagattaaaaaatagttgtatgtgtatatgtatacgttcaggatttgttctatttgttttctttttcttttttttcataggcagtggtcaatggcctaaggatttctttatacattgctcatatccactaaggctctattgagcaaaccacgccttaaaaatcttacaatcctcttcatatattttaaaggcaaatgcaaagaaatagctttgttctgttttgcattcttcatgggttaacatatcttctggaaaacttgttgctatggcaatgggatattatctatcttggtaatgtactacataaaaatagccctttgtgtttgagaatgatgttagtgacaggtggttgggtgaatgtatagcaggctgctttgtcaagaatagtttcccaacattccattgtttaaagttgtgaaatcaaaatgagtataatttttttctctctcaaaatgtaattttatctggaaaaggcaggcagtggtgctctgtttaattatgaattacaagccttcctttgcaggtcaggtcaacatgatgattgaagccacctctcactgtaataagtaaacgacttctctattctttctgtcagggtgtgcagcacaaggttgcgctgggggggccagtagggataattttcccattcttgaacacatcgttcttcctaagcacctcgtacttataaaccaagaagtaggaagtggtcaggtggaagagatgagctctgagctgttaatcaaatccgaatttcttgtaggttcttaggtgaaacagttccttgggaaaggtcagatttccatgttgcttttagtattgaactcacacatatagccaaggatagaatctgacccaaatcttaatttttcctttgaaaaatcctttgggcaatttttttttaatttaatttaattttattattattattattattttttattgatcattcttgggtgtttctcgcagagggggatttggcagggtcacaggacagtagtggagggaaggtcagcagataaacaagtgaacaaaggtctctggttttcctaggcagaggaccctgccgccttccgcagtgtttgtgtccctgggtacttgagattagggagtggtgctgactcttaaggagcatgctgccttcaagcatctgtttaacaaagcacatcttgcaccgcccttaatccattcaaccctgagtggatacagcacatgtttcagagagcaccgggttgggggtaaggtcaccgatcaacaggatcccaaggcagaagaatttttcttagtacagaacaaaatgaaaagtctcccatgtctacctctttccacacagtcacggcaaccatccgatttctcaatcttttccccacctttcccccctttctattctacaaaaccgccattgtcatcatggcccgttctcaatgagctgttgggtacacctcccagacggggtggtggccgggcagaggggctcctcacttcccagtaggtgccgccgggcagaggcgcccctcacctcccggacggggcggctggccggacggggggctgaccccccccacctccctcctggacggggcggctggccgggcagaggggctcctcacttcccagtaggggcggccgggcagaggcgcccctcacctcccggacggggcggctggccgggcggggggctgacccccccacctccctcccggacggggcggctggccgggcagagtggctcctcacttcccagtaggggcagccgggcagaggcgcccctcacttcccggacggggcggctggccaggtggggggctgaccccgccacctccctcccggacggggcggctggccgggcagagtggctcctcacttcccagtaggggcgcccgggcagaggcgcccctcacctcccggacggggcggctggccgggcggggggctgacccccccacctccctcccagatggggcagctggccgggcggggggctgacccccccacctccctcccggacggggcggctggccgggtggggggctgacccccccacctccctcccggacagggcggctggcagggcagagtggctcctcacttcccagtaggggcggctgggcagaggcgcccctcacttcccggacggggcggctggccgggcggggggctgatccccccacctccctcccagacggggcggctggccgggcggggggctgacccccccacctccctcccggacggggcggctggccgggcggggggctgacccccccacctccctcccggacgaggtggctgccgggcggagacgctcctcacttcccagacggggtggctgctgggcggaggggctcctcacttctcagacggggcagctgccgggcggaggggctcctcacttctcagacggggcggttgccaggcagagggtctcctcacttctcagacggggcgtccgggcagagacgctcctcacatcccagacggggtggcagggcagaggtgctccccacatctcagacgatgggcggccgggcagagacgctcctcacttcccagatgtgatggcggccgggaagaggcgctcctcacttcctagatgggatggcggctgggcagaggctgcaatctctgcactttgggaggccaaggcaggctgctgggaggtggaggttgtagtgagctgagatcacgccactgcactccagcctgggcaccattgagcactgagtgaacgagactccgtctgcaatcccggcacctcgggaggccgaggctggcgggtcactcgcggttaggagctggagaccaacccggccaacacagcgaatccccatctccaccaaaaaaatacgaaaaccagtcaggcgtggcggcgcgcgcctgcaattgcaggcactcggcaagctgaggcaggagaatcaggcagggaggttgcagtgagccgagatggcagcagtactgtccagcttcggctcggcatcagagggagactgtggaaagagagggagagggagaccgtggggagagggagagggctgggcaatttcttagagcagtaactctcaaacattttgtcgtcatcatctcacttttcttctacttatcaaaatgagtattgatttaattgtaatgagtaaataacagctccctgctactgaaatgaaatttactctagctttgagaatttgagagaccctcttaagaaaataccacagctggaaatttgagacctaaaagtaatacaatttgagtatctcatatctgaaatgcttgggaccagaagtgttttggattttggattttttcagactttggaatatttgcgtttacataatgagatctcttggggatgggacccaagtctaaacacgaaattcattaatgttttatatacgccttatacacatagcctaaaggtaattttatacaatattttaaataagcttgtgcatgaaacaaaattttgactgtgttttgactgtgacctgtcacataaggtcaggtgtggattttttcatttgtgacttcatgtcaacactcagaaactttcacattttggagcattttggatttcagattagggatgcttaatctgcagctctaattctgatatgcacggtactactgcagagatggaaccattgcctttgtcttttctgttggagtcagtatagatatcttgctactaataatatcagaagagagtgttgagtggtttgctgggtgcccaatactacttttagaacattttatgtattaactaatttattcctgtaaacattcttgacagtttttgtgactatttcccaaatgaggcgtacttgttagcatgtctttctgtttgtggtgagtaagcattcttgtgtattggaagacttgcttactagcatgtcacagtgttcttcatattgaaagcattcttctatcaggagttgacgtaattcagcctgtgggccaaatccatcctgccacccattttttgtgtattttataagctaagaatggtttctgcatttttaaatggttgggaaaacataaaaagaataatttgtgacatgtgaaaattacatgaaatttaaatttcagtttccataaacagttttattggaacacagctttactcatttgtttacatattgctaaggctgcttttgaactagagtggcagagttgagtagttgtaatagagaccatatagctcccagaccctaagaaaaagtttgccaatcccttctctatattcttctgtatctagaatggcagatggtcctcaataataacagcagattggtcaggtgtcatagtttatgcctgtaatcccagcattttgagaggccaaggtgggaggatcacttgagctggagttcaagaccagcctgggcaacacagtgagacctagctctgcaaaaattagccaggtgtcatggtgcacgctggtggtcccagctacttgggaggctgaagtgggaggattgcttgagcctgggaggtcaaggctggagggagacgtgatcacaccattgtgctccagcctgggtgacagagcgagaccctgtctcaaaaatatataaacagattggatttatgtacaggttcatatatatattaattttcttttggtatgcaatatatttttctttcttccactaaacgtttctcttgtcataagcttgatgtcatgtactatggcatatctcaaatatacgtgatttcagctctttgcatacccatattggttttcttttttttttttttaattgatcattcttaggtgtttctcgcagagggggatttggcagggtcacaggacaatagtggagggaaggtcagcagataaacaagtgaacaaaggtctctggttttcctaggcagaggactctgcggccttccgcagtgtttgtgtccctgggtacttgagattagggagcggtgatgactcttaaggagcatgctgccttcaagcatctgtttaacaaagcacatcttgcaccgcccttaatccattcaaccctgagtggacacagcacatgtttcagagagcaccgggttgggggtaaggtcacagatcaacaggatcccaaggcagaagaatttttcttagtacagaacaaaatgaaaagtctcccatgtctacctctttctacacagacacggcaaccatccgatttctcaatcttttccccacctttcccccctttctattccacaaaaccgccattgtcatcatggcccgttctcagtgagctgttgggtacacctcccagacggggtggtggccgggcagaggggctcctcacttcccagtaggggcggccgggcagaggcgcccctcacctcccggacggggcggctggccgggcggggggctgacacccccacctccctcccggacggggcggctggccgggcggggggctgacccccccacctccctccgggacggggtggctggctgggcagaggggctcctcacttcccagtaggggcggccaggcagaggcgcccctcacctcctggatggggcggctggccgggcggggggctgacccccccacctccctcccagacggggcggctggccgggcggggggctgaccccccccacctccctcccggacggggcggccggccgggcagaggggctcctcacttcccagtaggggcggccgggcagaggcgcccctcacctcccggatggggtggctggccgggcggggggctgacccccccacctccctcccggacggggtggctgctgggcggagacgttcctcacttcccagacgggatggctgccgggtggaggggctcctcacttctcagacggggcggctgccgggcggaggggcccctcacttctcagacggggcggctgctgggctgaggggctcctcacttttcagacggggcggttgccaggcagagggtctcctcacttctcagacggggcggctgggcagagacgctcctcacatcccggatggggcggcagggcagaggcactccccacatctcagacgatgggcggccgggcagagacgctcctcacttcctagatgggatggcggccgggaagaggcgctcctcacttcctagatgggatggcggccaggcagagacgctcctcactttccagactgggcagccaggcagaggggctcctcacatcccagacgatgggtggccaggcagagacactcctcactttccagacggggtggcggccgggcagaggctgcaatctcggcactttgggaggccaaggcaggctgctgggaggtggaggttgtagcgagccgagatcacgccactgcactccagcctgggcaccattgagcactgagtgaacgagactccgtctgcaatcccggcacctcgggaggccgaggctggcggatcactcccggttaggagctggagaccagcccggccaacacagcgaaaccccgtctccaccaaaaaaatacgaaaaccagtcaggcgtggcggcgcgcgcctgcaattgcaggcactcggcaggctgaggcaggagaatcaggcagggaggttgcagtgagccaagatggcagcagtacagtccagactcccacggcatcagagggagaccgtggaaagagagggagagggagaccgtggggagagggagaccgagagggagagggagagagggagagggagagagggagagggagagagggagagggagagatttggttttcataataatcataaccctttccaaatgagggagagtaatgaattttatcattttattagttagtgtgcttcctttgctagatcaggaattatatctcctagtaattataaccctctatttattatttttaactatattgctttctacttttgggctttcagccaacgtgtaaatattgacagtttaataatctgaaccaagccacctggactgattgtaatattttaatttaataaatcttgcatatggttaagattacatcttctacattcatcagattggatttaatgcactcaccataatcaactctggaacattcttgcaattattattgttatttttaaaggttttctcctttgtctgttgttttcccactttttttttttttttttaagacggaatctccctctgtcacccaggctggagtgcagtggcgtgatctcggctcactgcaacctccgccccctgggttcaagcgattctcctgtctcagcctcctgagtagctgggactacaggcgtgtgccaccacgcccagctaattttttgtatttttagtagagatggggtttcaccatgttggccaggctggtctcaaactcctgacctcaagcagtctgcctgcctcggcctcctgaagtgctgggattataggcgtgagccactgtgcctggcctgttttcccactttttaaagtaacagccttgttgagatgtaattcacataccatatagtcacctatttaaagtgtacaattcagtggttttagtatattcacagaattgtgcaaccatcacaactatttccggaatatttttgtcacccaaaaaagaaaccccatactcactagcaatcacccccagttccaccattcctaggcagccatggatctactttttgtctatggattcgtctattccagacatttcatagaaatgaaaccacatagtgtgtggtcatttgtgattgtcttctttctcttagcgtgttttaaatgtagcacgtatcagcacttcttattgccagttctgctgtatggctataccacattttatttatcaattcatgagttgacagacatttgggtcattttcactttttgcctcttatgtataatgctactctgaacacttgtgtataggtttttgtgtggacatatgtttttatttctgtcgaatatatacctagaggtggaattgttgtgtcgtatggtaactctatgtttaaccttttgaggaactgccaggctcttttgcaaagctgctgtactatttgacattcttgtgagcaatatatgagggttccagtttccccacatccttaccaacgtttgttattgtctatctttttgattatggctatcctagtgggtgtataatggtatctcattgtggttttagttggaatttccctgatgactaataatgttgcatgtcttttcacgtgcttattggccacttgtatatcttctttagagaaatgtgtatttagatcgtttgtccattttaaattgggttgtctttataaaatgttgaattgtaagagttctttatatattctggattcaatacatatgatacaatacatataatacatattttagtcatctatcagataaatgatttgcaaaaattttcttccattttgtgggttgtctttttactttcttgatggtgtcctttgaagcatgaaagcttttaattttgatggagtttatttattgttttctattgtcacttgtgtttttggtgtcatatttaagaaaccattgcctaatccaagatcacaaagatttcacttatgttttcttctaagagttttgtagttttagctcctatatgtcagtctttgattcattttgagttaatttttgtacgtggtgtgaagtaggggtacaacttcatacttttgtatatggatatccacttgtcttagcatcatgttttgaacaaactgttcttttcctaatgaattgttttggaacccttgtgcaaaaccaattgaccttatgtaaatgtaagggcttatgtctagactgtgtcagtatcacactgtcttgatttgtttaatctatttttgaggcagactttcgctccctgatctaaaattaaaatgtttcacaattgatgatgtcttatatgcatcaaaacttgcagactgggtgtaagtggcttgagaaaatatattggagactaaagtggggctgttggagactcataggaatcaaatagttagaaggtgggggagtgagagaggcagtaagttggatgcttcccaggtgtttagcagccatcccaaagtggcagtcaaaaataggctagctttacataatttcaaagttaggtactgatggttccagtttctttttatggattcttttaaaaagtgctgtatcaccaaatgctgttgatggcatagaagacaacactgtggaaaaatgtggacattgaccagtctgagtcaaaaagatggacagatattcagttctaaatgtgaggaatttttaggaaaaccttgagcagttaattttgcttatttccctttctatgtgtatatgaatgataaatgaaaagtctaaaagagctcctttaataagcctgagataaatgctaagtcgtagactactgcatcatatcttatttggcttttttttagtgccacctaaaatactggtgttttagctttgagatgctcttatcctcctgcttccagctctatctacacctcagaaggagctgggtcctttcccagagtctattgtataaattaaccttcttcctgtagtcactctatgtccatctgtttcccagccactttaattttgttctttttcctttctcttgtgcttgtagatttaagtcttaaaaacaagccaggtattattgtttatagtggaattttgagtaggagtggaggttaacctgtacatcaatctagtaggaatattcattcaatcactcaagggatgagcttatggaaaagttacaaaaatagtagcattcctttatattcctcaccctgctcccttaatgttaacattttatataaaggatcaagaataggaaattagtcttggtacagtattattaactaaactacagagcttatttgaattccatcagtttttccactggtggtctatttctgttctaggatcctgtccaggatcccatattgcatttagttattatttctccttagtctcatccagtttgtaataatttcttaatctttaatgacacctttgaagagtacagatcaatattttgtagaatgttcctcaatttgtatttgtttgatgctttcttatgaataaggttgttcatttttggcaagaatataatgatgcatatttttcagtgtatcatatcaaggagttcatgatgttgatgtgtcttgttactggtgacatttaccttgattccttgtttaaattgctgtctgcagggtttctctacagtaaaattattactttttctctttatggttaaaatatcttgggggagatgctttgagactaggcagatatcctatttatcctcaaatttttgtccattgatttttttcattctttggtggatcactctgtatcatagagtatttgtgacaaatatttgattagcagaaataaagctatgccctacaagaagcaaagatcaattacattgaaatcctattgtattggttaatataacgctagcagctgtgttcctcaactttcaggagcttaacacaacagatgcttttcttctcaatatgggcatttctggttgtgtaggcagttttctgccatgttaattcaagtatccagactaaactttttatactgaagtaacttcaaactgacagaaaatagggatgcaagaatagtaccaggaaatcctgtataccctttactagatttacttaacatttgctacatgtgccttatgattttctttgtctattcatatatgtatatgtattttatatatattttatatatctgtatttatatattgattgccatatactaaatcacttgagattaaatcacatacatcatgttcttctatgccttaatagtttaaacttaatatatttatttgtttaaatctagtatacagtttcagaattgctaacccatatctgtttgagaaacactttcactaactggattacagcatttatacaattcttttattctttagttttgcaatatctagtcaagatacgattttccagtttcccactgaagtattaagtttgaaaactgtacataagcacactgttattcaaatttaggaaatttaatatcagtactttagtatgcagtctgtattccagtttcattaattatccccaaaatgttcttcagtggaatattttttttctcctgatacagtatcaagtccaggatcatgtattgaatttatttgtcatgactttttagtttcctttgatctggaacagatcttataagcctttctttgtctttcatgacatcgacattttgaacaatgacaaatttatgacattgttttgtagaatgtaccaaatttgggctgggtgctgtggctcatgcctacaatcctagcactttgggaggctgaggcaggtggattgtctgagttcaggaactcgagaccagcttggccaacatggtgaaaccccatctctactaaaaatacaaaaaacaaaaaaaattagccatggcacctataatcccagctactcaggaggctgaggcaagagaatcgcttgaacccgggaggcagaggttgcagtgagccgagattgcaccactgcactccagcctgggcgacagagctagatgctccatttcaaaaaaaaaaggaacgtaccaaatttgggtttggttgatggctcctcttgtttagattgagattatgcatttttaaaaaaacttttaggttcaggggtacatgtgctgatttgttgtataggtaaattcttgtcacgggggtttgttgtacagattatttcattacccaggtactaaacctagtatgcagtagttttttttttctcttctccctcctgccaccctccatcctccaataggcctcagtgtctgttgttcttctctgtgtgtccatgtgttctcatcacttagctcccacttacaagtgagaacatgcagtatttggttttccgttcctgcattagtttgcttaggataatggcccccagctccatccatgttcctgcaaaggacatgagctcattcttttttatggttgtgtagtattccatggtgtatatgtaccacattttctttatccagtctatcattgatgggcatttaggttgattttatgtttttgctattgtgaatagtgctgcaatgaacatacgcttgcatgtgtctttatggtagaatgatttatattcctttgggtctatacccagtaatggggttgctgggtcgaatggtatttccgtttttaggtctttgaggaatcgccactctgttttccacaatagttgaattaatttacactcctaccagcagtatgtaagcattcctttttctctgcaacctcactggcacctgtttctttttgactttttagtaatagccattcttactgatgtgagatgttatctcattgtggttttgatttgcatttctctaatgatcagtgatgttgtggtttttttttcatctgctcgttagccacgtgtatgtcttcttttgaaaagtgtctgagattatgcatttttgtctggaatactgcataagtgacatgtccttctcaggcaatgcatcaggaggcacatgatgtctcaacccctcattggtgattgtaattttgatcatttggttaaattactgtttgcttaagtgttaactatttttagatatgacgtatcagagtgatcaatactgtgaagcctcttacaacagtgtttagattgaaaaattatgagtgaaaagcctttcacagtcattcggattgaatatgcctaacatgaaatccaaactgtttcaacatttctttcaagtcattttctactatggaaataataatgcatgatttagccatgcctgagttttatttcctcacgcaggcatttatttctttaaaaaatttaatttaaagttcactataaaacttaccattttaaccatttgaagtgtacacttcagtggcattaagtacattcacaatgttgtgcaaccatcactaccatccatctccaggacttctttatcatcccaaacataaaccatatctactaaacagtaactccccaattccttctccagcccctggtaacctcattttatatgccatcacaatattttagaataaacgccaacttcctggggtaagatcatttgacttttgctcccagatcagaactatgataaaaatattatttgctatatactaacagggaaatttctggattttggcatgagttactgtattataactctaaatcctggtaagggaagcatttttattctgaaagtaaacaaaaataaccattagtatgataatctttacctctgggggtggggtattttggagggggtgagtacaaagagaggtgaaattattcctctagggtggcagaccagagtttaaattgtttcttatgtttttcatcttggttgtctaccaattggatatagtcactcagatcatccatgtttttgtacctggtttgataggtataaatacctataaattggaataaattctagcaattagaggtccatgttccttggtctgtaaagtgaatataacaaaactgacttctctccaaagggtgctttgagacaaaactataaaacactttggagagtagaaggggggtccttatttttagtaacattcctcagtgttcttcaagaactcacctactgccaatcattcctctgagttaagaatatatattagaactagttttaatagcactataaactatagatagcatggccatatgtccctgtttgcctggagctgaataaattacaggttcaaaaatactcaaataataaaattgcctaggtggtgacccacctagtttgttgctgtatggtgttgggtatctcttttttttccttgacaaatttgaaaaggccttgaaaccatgagcagattccttggttcagatggtctgtaataggagacaccaggacaagcctgagtctcctgctcttgaaagattagcatattgatagattgcgtacccattatcagttaggtatctgccaaaccatttgcagcgtttctctggagttcatacagttgggaagacttcctagaggcaagaggtcttttacctgaagattcagcagttactataggggccttcttttggcttcttgctcttgggacacctttacttgaatgaggtagtcttttgccattagtgcctgtggggccttaatgattcctattgggatgagttggccagaagtgaggctctccacttcatgttgaaactaacttctgcctgagtattaaggatgggtgattctgaggtcctgagccagctggaaggactttcattcactttctactcttgtctgaagaatgcttaggctaccttactgttacttctctggtggtaccaaaggccatgtaatgacatggctggatgcgatcactcacgtctgtaatcccagcactttgggaggccaaggcaggaggatcacttgagcccaggagttcaaccagcctgggcgacataggaagacccccatctctaaaaaatttttaaaaaatctagctgggcatgttggtatactcctgtagtcccagctactcggcaggctgagatgggaggattgcttgagcttaggcgattgaggctgcggtgaaccatgatcacaccactgcactccagcttgggcaacagagcaagaccctgtctctaaaaaaaaaaaaaaaaaacaaacaaaagatgtgatgattgcctctttcggttatatcctgctgcctaagagcccaccccagaatttagtggcttaggataaccattttcatagttttgtcagtgagggattagggaagatgtcagctgagctcttcatttctgctccagatggcattggttgggcaatgggactggaggttctaattctaagatagcttcttcactcttatgaatagctcctcagtgtctgtggccagtctctctccatgtggtatctcatccaccctggcctttccacatgccttaggcttcccacatcatggtggttcctgggtagttactcttcttacagagtagggatgaaatgaaagcctctattctaaattcagttaaatactggtacaaatatttagtactgggattgtgggatcattttcttatatcataattataacccaatcagggtagaaaagtgaaagaaagaaggacacttcattttctttgctctttgtgtggatgatgggttgtacaaatagcaggaggttcaacttttggcttgttttggattactgagtactatccttcagaaatgatttcctaatactttcccggccatctggcatgagcacagaagaccttttactcaataaaagtaagctaataataataagttgaaacatcttgataataaatatatttgtacagcttttcaaatcccaggttattgaaattctgtcagccttggctggtttccatgctccttctgtgcccttgtgtttcctttttttctttttttttttgttgagccactcctgctgacttccaaaggatgctctgagctctaaaaggaggagcagttttgctggcatgcagaagtggtgaaggtaaggcttggattcaattacagtaatctcagaagttcttggtagaagaggggcacagaatcccagcctccattttgcaggtaaggaagaagaattataaaaagataaaatggcttttcttaatgtcagcatctgattctttaccttctttcaccctagcaaagattgttaacataaaacagatgttccttggacaagagaaaagtaatagagctggatcttttcatgatcctgcatttattatttgtagcactggatctctaaactaggaaaagcaatgtcgattctaactagaaattatggggcatttaataacacgtgaggcaaaattatgaggaaaggcaagaaaccaagtggctcctagcttctaacaccttattttctatggtgtaagttaatgaatgatccatttttaatgccataaaaaaggaaatttccgataggctttaccttaacttcacgttgctgtttatattacagacaaaatgctaaagttaacaagtgtaaaatgccctaggtcagggtttcgagtgcccataagcaattctctagaattattttgagtgctcagattatagatttgcccccataccatatactgtattacctatcactgcaagattctttatagggtgtcaagtatgtgggaggatttaaactaattgtcttaaatgcttcatgggataggagatgatccaatgggaactgaatgttttcaattaggatgtttccatggatactattaagcatgccaagattcatagccacaggagatttttacttacttcaatattgattaagaaatctgagaacaatctcaagaagtgtaggatgtaggcggaggataaattttgaggatagtctaaaatttgctttctcttccatagttaaggcctagtccagaaaaagtctaggcagtcagccaagtctaacagcaggatttatgtcaagagaatgtccagaataaaagtgaacatgggttgtttcatttaccccaggtgtatttattaacatttatttaatgttacttattatttgtttattaccattagctttcttatgtactcggtacaaagcattagaattacaaccctttgtatctttgttgtttatgaggaaaacatcctaaatagtgtctacagacatcttaaaattcacattcctctgagaaaggtttatcccttaggttattacttttttttttttttccacacatgggttttttacctgggttctcagatctccaagaaatcggtggatagaattcaaggtgacttcttggatggagaaaaagtacgtctttattttgaccaaccatggatatttagcattttcatcaattaatgaatgcaggtgacaaatcacagtactattggccccatctttgagtttgtcctcaatagctcacagatattttcatattgtatcacagttgttgcagatatcttgaaatattgtttattctaatcactccttcaaaatttgggtggttattggcattatcaccagttttttttttttttttgaggcagtctttctctgttacccccaggctggagtgcagtggtgtgatcttggctcactgtgacctctgcctcccaggttcaagtgattctcccgcctcagcttcctgagtagctgggattacaggcacatgccaccacggcccggctaatttatttatttatttattctttattttttatttttaaattttttttagatggagtctcactctgtcgccaggctggagtgcagtggtgtgatcttggctcactgcaacctccgcctcccaggttcaagcgattctcctgcctcagcctcccgagtagttgggactacgggagcgtgccaccacgcccagctaatttttctattttaagtagagatggagttttaccatgttggccaggatggtcgcgatctcttgacctcgtgatccacctgcctcggccaaaatgctgggattacaggcgtgagccaccgtgcctggccacattaccaccagttcttgatacttaatgccataacaaaaggcacatgtatcactatatcacaaattagcattttataatattttaataacgttttcaatataagtggcttcccttgtaatcatatattttatttttgcacttaaaaatataattcctaaaagggatccataaagcttcaccagactgccaaagcgtccatggcacaggacgttaagaaccctgttccaaatggaatgaagattagaagcactatcatatgttcattttctgatcgcagtttaagaaagagtttcctacttaagtgcttttcacagaaaatctaaacttaaaggttaaaagggaattcttttgtgctggctcatgtgtgggccctacaaagtactttgcagtcatatctgactttcgtttgagagtttgtcttcagaaatggaagaagaaaaggcattcaggtatatgacaggttgcattctgtagaacattgttaaatctatgggaggggagaaaagttccattcagtgtcttgtggattgtggtaggagtcagttgtgttcttgcagaaatttccctagacagtgcctcttgcctcctcctttcttgtcccacagtactccatggagcagatgtgggaacttggatgcctgatgggaattgtaaccccatgctttgccttatcctggtggggactgatctgaggtttatccattaaactgtatcagttcatggctgggagtaggaatgcagaaaacacaagcaaaatgactgcaggaaggtttaaataaaatctcatatgtggcttttccttaacacattattttgcaaaaagtggcagagtgaatttgctgtgatatgataggatcattctggacttttacttaatttacgtgttctctagcagaatgctgaaggagcacacataaggagtggggagttggtatttggttctgtgacaagtgctatcttataacagaaaaatacatatttttgtgaaacttcaaatgcatttttattccccagcacatctgtgattctggatccactaccttcttccaagtgtgatcaagcactgtacctgacagtatcgattatccttacccgtaggcaaaaattgtattacatttattttacagtgatctggaaaaaaaaggatgacaacaaaaaccagacacacttcatttctattccggtaacattttttggtaataatttattactgtacaagtcacacaccatataagtcacacatttaaagtgtcaaattaaatggtttttagtatattcacaggatcgtgccatcatcacagtcaaatttagaacacttattacccccaacaagaaacctcatacgctttagcagtcaccctccattgccccccagttttctaaccccaggccctaacaaccactaacctactttctgtctctatgaatttgcctcttctggccatttcatataaatggaattacacattttgtaaccttttgtgactggcttttttcacttagcataatgttttttaaggtctacctatattagagtatgtatcagtactttattcctttttatggccaaataatattccattttctggatataccagattttgtttatccattcatctgttgatggacatttgagttgtttccactttgtgctattattatgaataatgctgctatgaacattcatgtttacatcatgtatacattttaatgtggacatatgtttttagttatcttgagtatatacctaggagtggaatcatatatatatgtttttaaaccaaaatcaaattttaatgttgcagaatccctgaagcacttttaggaactgttcacttccatagaacagtttgcaaatcagtgttaaagtggagagagtgttgatttttttgtgcatgtatttggtagacatcgtttgaatcttgattttataggctgtgtgaattttgtcaagttacctgtgaacatctttcttctagtatagaatgttagtacctctggatgtttcacgagttgatagactgtattattgcttgaaaaattcactgtccatttattaccatcaactttggccacggatttgctttggctagtggcctgtgaggggaagtgatgtgtgccttcttccaggcagaagctggtggtttgcctcatctcttttcctttctgccatgatgaccattgatgttccagttggacacaggctccatcagcttgtgtatcagaatgaaaatgatgtggggcagagccctcatagattttgttgcatgagtatggaaaaagtgtcattttaagccgtcaagatttggtgactatttgatactttagcacagtggtcctcaagcaatggcagttttgcatttctcacactgagatatctggcaatgtctggagacattttttggttatcacacatggggaagtgctcttggcatttagtgggcagatgctgctaagcatccaacactgcacaggacagctcccacaacaaagaattatctgatccaaaatgtcaatagtgctgaagtttagaaaccctgctttagtataacctagtttatcctggttaagatagggtgttgagaagattaaatggaaaaaaaatatataaaatacagcacacagggtggtctttttttggtaattatgtgacagagcttggcaatggctctgaggtcttcccttgcatttgtgggtcttttccaacttccctagggttcagtattcagtttaattgtagttgtgtttataaatcaaggctcgtttttagcagaatcatataccctttaaaaaagggggagaactaacattagatgcctgtttggcaccaggctctttgtatgtgttttgaatttttacagatattctctgaaactgatattccttacctccattttgttttgttttgttttgttttgttttgagacaggatctcactgtgttgcccagactggagtgcagtggtgcgatcttgtctcactgcaacctccacctcctgaattcaagcaattctcctgcctcagcctcctgagtagctgggattacaggcatgcgccaccatgcccagttaatgttttgtattttcagtagagatgggatttcgctatgttggccaggctggtctcttaacttttggcctcctgtgatcccccagccttggcctcccaaagtgctgggattacaggcatgagccaccatgcccggccctccattttgtttttgatgaagacattgaggcactgaagttaagtaatttgaccaagatcacatggcttataagtggtgggcctagaattcgaagcacatctgtttgcctccagaaccctcttctttccacactgctatactacctctttagcagtgactttaacatagagaaatgaaggtaatacctgatttctaacaattatgtgttgtattagttatctattgctgtataacaggttacctcaaaacttagcactttaacacaacaaacagttattgtctgacatagttttgagaatcagtaatttaggggaagctaagctgggtggttctggctcaggatctctatggagattgcaaacaagttgtcttccagggctgcagcgatctgaagacctgattggagcaggaagatccacttccattgtggtgcactcacagggctgttggtgggaggcctcagttcctcaccatgtgggtctctctttagggttgcttgattgtcatcatgacatggcagctggcctccttcagagtgagggatctcagagagacagcaaggcagaagccacaatatcttttgtgacctagccttagaagtcacagatgatcacttctgctcttttctattggtcacatacacaaccctgatataatgtgggagaggatgatacaagggcatcaagaatactatgagatggaaatcactgggggccatcatggaggctggttactacatgttaatgatcctcatttgccatagttacaaaattatgaattatatttccttttcatattctaatattccaaacacctgttttgtactttaagatacttaaatcatttagaatgtgagtgaaaatacaaattggcttttgtaaacacttactgaatgggtaaaataaaggccgtggtacagatacttcattggggaattttttttttaaataggtttgactagctgaggcttcttgaatcctgaaaagtttggtctgatgtacttttttttttttcctggaaaatctccttgtaccaaacactgaattcttcatttgccaaagtccacccaactttctgatgtttttattgctggtttgatgtgcttgaatgccagccagagtataaggtgaatggtagatgcaaggactgtgcagtttccacggagacttctttcaggagcccttcattttttcattcagctattgctgggaggcatccccttccagttaatgtgtggtacacatcaatttgagtggctcttagaaaggggctcagtttatacaaattaagaattgaggttttttttttctctgtatatcttcaacgttaaattagatttctatgaaacttgaagatgttaacaggaaatcttcctgaaacagtttaactatacttttgtttattacacttgattttgagcttttgggaataaaagtagggtcctggctaggtacagaggtatatggatttactgtgtctaatcgtgcaaccatgaaataaacgtttgcacttcaggaatcaacccatcactttttaaccactgttgtttgcattggcttagagctttgtgcttccttcaactattttccttttttctttcaaaactgtgttcagttggttgtgaccaattttacacagagactggctcactcacttatgttcttgactcctgctgtcccaatatcatgcttcatttacacagggatagcttttcctggctttatctgttgacttgacatcctgtgcatcatatttcttttcttagatatagagaagactgaaaaaaatccacgatttgaagaaaatttrcaaaagtgcagagcaatgtgaaagagatagctttaattttaattttcactgtagtcagaataggtggcctcctgatgggcagacttgctttctcattttactctgtccagtgtagatacccagatcaatcaaggtcaagctggtctggtcattaatacaacttttggttttaaacacagctgtgtacgggggttcttagcattattaatagaggttataatgaaaacaaggtatagtcatacagttgtctgtgtgggtagtggcatggaggtggagttgttgcttaagatctgaaagtcaggaagctggaggtttttgtaattttattcattatcaatcttaagaatttattttgatcattataaatgcatgactggtgctattttccaatcctgaggttttttgggaaatttttttgaaaagaggccaggatgaggataaaaattaattttgaaaatccatttcaaagactcattatgctatgctccatcactgcaattttaatgcaacttatatattgtgcttttacctttgggactagcattcttaaaagctgacttttaatttggactttctaatatgtgtcggctctgtcagctcacgagtgtgtttttatctgtgcatcatgttatattgggacctgggtggaatgtaaatcttttactggcctaaatctgagtctaatcctctgcatggctttggtagaaaatcaatttcctctgctctgtcaagatttttcaggtcagtgctctttggaagtttcccagttctcttagattaaaatagattttgtttctgtgctacatactggtattagttagtaggacactgggatctaaaagcaagagaacagaggcagacaagatatccatgagttcttctatttcagttaacttgttgacacactgcacctttgaggaaccaaggagtttgtgtgctttcaggcatcatttgggggagcaattgtaaatgactcctgtaggtgaggctgtgcacttaattttaatgagttcaggttcattaagtgacctgctcactgggtcattagaagtgacctcactagaagtgaatggtaaagagaagaactacctaagttccactcagcttgtttcactactgtggggtattggaagtagagtgacaacttggactttctcagttttagcactgaaaagtcccacatcccaggaacttactcagtccccagcaaactagggggagcgggggatggttggtccccctagcagtgaaaagtaaggggatggatgatttggaactggttagtacccttatagatttttttttttttttctgagacaggttcttgctgtgtcacccaggctagaatatagtggcatgatcatggctcactgcagccacgatctcctgggtccaaatgatactcccacttcagcctccccagtagctggaactacggggacaagccaccacacccagctaatttttatttatttatattaattaattaatttatttttttgtagggacagggtctcgctttgttgcccaggctggtcttgaactcctgggctcaagtgatcctcctgccttagcctctcaaagcactgggattacaggtgtaaaccaccatgcctggctgtcttataaatactttaaggagggatttattagagacatgtagcaccttgctgcccagtgatgctagtaaatgagtgactctactttgatttgacagaagaaacaatggaaagaggagagatggaagtttttctacctaaacttcctaagaggatgtgtttaggggatgtgttggtaaaaagttattagcattaatgtttacctgtatctttctcatagataatgcaaagacctttaactccacttatccctccttttaacttatgttgttattgccttgtattttaatactatatattaaactctacaagacatcattattttatgcaggcattgtttatttaatcagagttcagtaaactttttctgtaaatgccagatggtaaatattttaacccctgcaggccttatagtctctgtcacaactactcaactccactcttaatagtgccaaaatggctatagacaatatggaaatgattgtgtgtacccatgttccaataaaatttatttacagaaacagacagtgggccagatttggcctgcaggccttactttgacaactcctaatttagatttatctacatatttatttattttccctttatttcttgctatatctttgaggttctacctgggatcattttcaaggcaaggatgtctattctcatcactgtttttcagcgttgtgctagaaattccaaccagtgcaataaggcaagaaaaggaaataaaaggcatacagagcagaaaggaaaaaaaaaatgaaactggccaggtacagctgctcatactttgagaggcgagctaggaggattgcttgagcccaggagttccagaccagcttgggcaatgtagggcgacccccatctctacaaaagtaaaaataaaaaaaaaattagcagggtgttatggtgcatgtctgtggtctcagctacttgggaggctgaggtgggaggatcacttgggccttggaggtgaagtgagccatggtgactgtatcactgcattctagcctgggcaacagagtgacaccgcctgtctcagaaaacaaaacaaaaacctgtctctatttgcagatgacatgattgtctacatagaagaccctgagaaatctacagtctacagaataactcctagacctaattaagtgagttcagcaaggtttcaggatataagataaacatacaaaaatgagttgtatttctacatactagccataaacaaatggacactgaaattaaaaatacaataccatttacattcactcaaaaaatacttgggtataaatctaacaaagcatgcacaggacttgtatgctgaaaactatacaatgctgatgaaagaaatcaaagtctaaatagatggggaaacataccatgttccgggtttcaggatataagataaacttacaaaaatgagttgtatttcacatactagctagaaacaaatggacactgaaattaaaaatacaataccatttacattcactcaagaaatacttgggtataaatctaacaaagcatgcacaggacttgtatgctgaaaactacaaaatgctgatgaaagaaatcaaagtctaaatagatggggaacataccatgttccaggattggaagactcaacatagtaaagatatcatttctcccccaaattgatatacaggtttaatgtaattcctgtcaaaatcttagtaagatttttttgtagatataattataaaatttatatggaaagggaaaagaactagactagctgaaacaattttgaaaaagaataataaagcaggaggaatcagtctgtaagattttaagacatataactacagtaatcaagactgtgtgatattggtggagggatacatgtatagatcaacggaacagaacaaagaacctagaaatagaccaacagaaatgtgcccaattgatctttgacaaaattgcaacagcaattgaacggagaaggaaagatagcctttttgacaaatggtgctaggtcaattaaacatcaatatgtcaaaaaaaaaaaaaaactcttgctgtaaatagtacacgttatatgaaaaataactccaaatgtatcacaaacttcaatgtaaaacataaaactataaaaataattagagaaaatcttcaggatctaaggctaggcagagttcttagacctgacaccaaaggtatgatccataaaagaattgataaattggatttcatcaaaataaaaaatacttactctgagaaagacctcataagaggatgaaaagacagactacagagtggggggaaatatttgcaaactacgtatccgacaaaggactggcatctagaatatataaataactttcaaaacttaacagtagaaaacaacccagttagaaagtggaaaaaatacaagaagggacatttcactgaagagcatatacagatgacagataagcatgtgaaaagatgttcaacataattagccactagggaaatgtaaattcagaccaaagtgagctatcactacatacctataagaatggctaaaattaaaaatagtgacagcatcaaatgatggcaaggctgtagagaaatggaatcattcatactttgctgatgggatgtaaaatgatacagcccctctgaaaaacagtttggcagtttcttaaagacactaaacatgcaactaccatatgacccagcaattgcactcctgggcatttatcccagagaagtgaagatttatgttcatataaatgccagtatgtgaatgttttataggagttttattcataatagcccataactggaaacaatacagatgttctttagtggatgaatggttagacaaactggtatatccatagcatggaatactacccagcagtaaaaaggagtgaagtactgatacatgcaatgatctggatggatctccagagaattatgccgagtgagaaaagccaatcctgagtggtttaaataccatatgattccatttatgtaacattcttgaagtgacaaaattatggagatggagaacagattagtccatgccaggggttgagggggcaagggttgggagtaaaatggatagctataaaaggcatgatgaggccaggcgtggtggctcacgcctgtaattccagcactttaagaggccgaggcgggtgaattgcttgaggtcaggagtttgagatcagcctgaccaacatggtgaaaccctgtttttactaaaaatacaaaaagtagctgggtgtagtggcaggtgcctgtaatcccagctactccagaggctgaggcaggagaatcgcttgaacctgggaggcagaggttgtagtgagctgagattgtgccactgaactccagcctgggcaacagagcaagactctgtcttaggaaaaaaaaaaaaaggcatcatgggtccttgtgagcatgaaaatgttctctattgactgtgtcaatagagacacacaattatgttgtgtgtcacaaccataatcacaacattatggttgtgatattgtactgtagttttacaagatgttaccattgggaggaagtgggcaaagggtacataggatctctgggtatcatttcttacctctgcatataaaactacagttgtctcaaaaggtttaattaagaaagtatttaagaaaaagaaccccaggatctaaaaagatcagagtcagagaatcacaaatgctaaataagaagcacttttgtatttggtgatgttctgaaattctggctcagttttgttatgaaatggagccacgtgggtccatgtgagtgagtccctgtgcacaggtgtatgattgactttttccctcaagtgcttctaatttgggatgttcttcactgtgtgccctttgagtgtctcttgcctctggttttttgttagacaaaaaaaccagtttttaaatgtcagttccaaggtcttttctgggtacggttaacttttatgatttcatttatgcagtgggttttcacctaagggccatggtttctagacactagactcgtttttcccaagcgattcatctctttgcctgtgggatggagagattcattctcttcttctcttttgcagtagaaactccagttttgagctgggcacctggatgcccagagtaaaggttgtactgcccacatttcattgtagctaggtgtgcctgcgtgaccaagtatgaaccttctatttagattaagccacaagataagtggagctatcaattggctttaacaaatatttagtgaataggtaaaataaaatactttatataagagctgtgtgttctgggttgaattgtgtcccccacaaaaagatatattaaagtcgtaacccttagtacctcagaatgtgaccttatttggaaagagggtctttgcagatataattaatttcaggtgaggttataccggagtagggtgggctcctaatccaatatgatgagtgtcctcagaagaaggcagtcaggcacatgtaccctaaaacttaaagtagaataaaaaataaataaataaataaataaataaaaaagaaggcagtcaggtgaagacacagacacacagtgggaaccccctatgaagatgaagatagaagcaatgtatctacaagccagggaccgcctgcggctgcaagaagccaggtgagacacatggagctgattctccctcacagcccttagaaggaacgtgccctgctgacaccttggttttggacttccagtctccagaaccatgggataataaatacatttctgttgtttgaagccacccaatttgtggtactttattatagcagccctaggaaaccaatatactatgcttttgatattatttttaggatgttgtggtttgaatatttgtgtctcccccaaattcctatgttgaaacctagtctctgatgcgatagtattaagaggtggggcctttaggaggtgcatgagggcagagcccttatgatgggattagtgttcctagaaaagagacttgagggagcttgtttgccccttccagtatgtgaggatacagcaagaaagtgccatctatgaggcagagagtgagccctcactatacactgaatctgctggcaccttgatcttagacttcccagcctccagaatggaaagaaatttctgttgtttataaattactgagtctaaggtattttgttgtagcagccccaacaaactaagacatggagtattttaaaaaatgggttgaacattcagaggcttcttaatctgagtccttagatatttggactgactctgccttctttttccagtgaaaagatctcgctgtatgaaacatagacattcttcattgccccaaagcccttccaccttccttatgtttttattgctggtttgatgtgcttgaatgctagccaaagtataaggtgaatggtagatgcaaggactgggcggtttccatggagacttcttgcaggagcctttcctttctcagttcaacagttgtcaaggaaacatctagtttcaattaaataaatgtttgtggggtctgccaatttgagtgtctcttggaaggggatttggttaaacttcttaaacatcgtaataaacaaattcagagcagaggctttttaggttcccttccagttatattaggtttttctgtaacttagggatgttaactagtcctctgtctgaagtgatcagactatttattcatatccagaaaatattatttttgagtcttgtggggaggaaaactgaggcttaaagaaagagaggccaaagccagggagctggtgttacatggcaccagctatatatacatgactatagtccatgctctttagtacgtcctgcaggataagagatccaaggggcctgacctttacaaactgtttacaggctatggagtttgctggctcagcactgtgtgtttattgcttctagttagctattgttgtatcagtggctggagttggtgatggttcacggaaatagtggtgagagtacagattctaggtatatgcaattctaataaatgagacttccctagtgttatctgtattgtgacagcctccccattgtgctctttatcaaacagtaaggtatggtatattgcaaaatgctcacaatactttgcaactcttcccatcaagaggtagagtcagtttctctattcttaggatcttggctgtcctgttgatttggtctgaccctggaatacagtagaaaagaccctgtgtgggttttgatcctaggcgtgaggtagagcttcagtttcttgctgctttgggaactctgccaccttgtaaaaaaagccctggctggcctcctggaggaagagagactatgtggaggaaaatgaaggtacccagacaacccaatagtcaactgcagaagcataagtgaccctcatctgagatcaatggtgcctggctcggatcagtataattgtccagctgaactcagcccaaattactgacccccagagttatgaattaaataaatgctgttgctttaaggcacttaagttttggggtggtgtgttatacagtagtagataattgatacagccaagtttggaagctctggaatgatcagggctcacctttgacctgtcctctataaaacccaggattcttagtaacacagtcctgttaataacagaacttgcctatggcaaatctaagcggaaaagcagtttattggcaggatattgtgtagctacatctttctttaggaagaccagggacaaggcttgaaaactgcacaactagggggcagtactgccagaactacagccagataacctcacagaattggtagctactgaatattggatgcctccacctacaccaccaacattgcctgcattggacattgggtatggggctgctcctggaactggatgttgttcctgtcactagaaaacaatcatctactgttcttgctgtttcacagcactcattactgattcagatgcccgtgtgccacgtgtttatagcagtgcaatttgtaattgcaaaaatagggaaccagcccaaatgcccatcaatcgagtggataaagaaaatatatcaaaaatatattttatatgtgtgtgtgtatgtatatgtgtgtatatatgtgtgtatgtatatgtgtgtatatatacacacacgtacatatatatacatatatatacacacacgtacatatatatacacacacgtacatatatatgcacacacacatatatatacacacacgtaacatttataatacgccatggaatactactcagccataaaaaggaatgaaataatagcatttgcaacaacgtggatggagttggagaccattattctaagtgaagtgactcaggaatggaaaaccgaacgttgtattttctcacttataagtgggagctaagctatgaggatgcaaaggcataagaatgaaacagtggactttggggcctcagagggaagggtgggaggtgagggataaaagactacacattgggtacagtgtacactgctcggctgatgagtacctcaaaatctcagaaatcagcactgaagaacttaactcatgtaaccaaataccatctgttcccccaaagctatttaaataataataaaaacaaaaacaaatgcctgtgtgggtggtgtctggcagagcgtaggtcttgtgcccataccctgattgaaaagaaatcaggaaagtgagaatctgacacttttagcttatttagctgaaagcaggtggaaaatttcataaacactggcaaagggttcggataacaggcagccaaaagaaaaatggcaaatgttcattagtttctgttgtatactctggttagctcagttggttacagcacagttatgatgaagccagcattgtggtttgttcttaagttttattgaaagaaaatagttctgagattgtcccccttacacctgctccctctctcacagatgtgtgctgatagccatttgtaaggccaggcaatagtggggcctaacttgcatctgtctctggctgctaaggtacaaagattatgtgtctttcagttggtgggcccagagactccattcactggcatagtgtgccacataagagaactgaatgaatggtatctgtgtgaatctaaggggttggctaattgcgcagtgaatttggttcatgtaacatttataatacaaattgttgggcagcaagatctttcaatccagacggtttctagtttttcagaatttctctgataacttctctgaactctgaaattcttatttgcaaaaccatctatatagggttcatttaaatattagaaatagtactcataaagagaaaagcataatgcctagaggatgtgtaatagatgttcaataaatgttgatcatttccctcaaacttcttagattcacacaccccaaccagattagaaactctgacacggcttgccctttttgtgttcaattctctctcagttgttaagtgaagacccaatccagttgttaaaataataaatgcacctcttgcctccctgacattctggcaaccttactctgaggaggctggcccggttcgaagctggctgctccagggcactaaagctggagaagggcccttccaccctgttcataactgtggacagtaaactgtatttgggatagaggatcttgggaacaataaggacctagatccaagctcatgcattgtggtgggactgtcaatttagggggatgggtagattttatcagatctgtcagtggaaagtttggggagatggaatagtatctacaggtagttccaggtaggaggaagagatctacctggctcctagggatgtccatcctggcaagcattgctcagtggcaggagttgtaagagtagggaaggtttaggaatttggatatcagggaagtgtcagcaggtagctggggatgaggtgcaggacaaagacagacgagaggaagaccaagccttaaagtgatgagtatctagatagggaagaggatggatgggtatagcttggacacagaaaggggattcagtcatggaaagaggtcagtctgcaatgtaatgtggctatcaggtcacaggagggccaagagcaggacaggtttggggcttggttctggttagtcgaggcagagccccttagaggtgtttggatttgccatggtgatgcaggggacctgagtgtgctggttgtcatgagatcttgttgctgggagaacagtcaagaacagggtagaaaggcccttccccagctttagtgtgccttggagcaggcagctttgaatagggccagcttcttcagagagagctgccagaatgtcagagaggcgagaggtgcatttgttattttaacaattggattgggtcttcactgggagctctacaaagaaaccaaattagtgaagttagattgcctatcccaccaacaatggatgtttatggtatgagtttagctctgtgctagagaatctcaatatatttagatttgggcttgagagagagaacttcagtgtgatctgagactgaacttccattcacattcattcctcgaggaagcatgttgaggatctatgtgtaatatactggtgttccatttacttgaaatatcctggcttgctctattcctctcacttaggcactcactcctctaaaaaataaatgtgtatatgtgtatgtgcatgtgtgtgtacatgtaggtgtaagtgtgcataaaatatggaatagactgaaatcaacaaacttataaaaataccaaataacctcaatctgtaattttatttttgagaagcactaaaaatgtcaataaatgaattgtctgaaaaactaatcctttggctggtgagataagtctgagttgccagaaccagttaaagctttatataatttggcagtacatttgcgttcacctgagatttctctgcctccagctgtacaaaaattctgtgatatgcagagcctcgaaacctgggccagaatgctaaaactaattttctttcgtaatctgagccgtaattgcattttaactcagttctagtgtgaagactgcttttgtatgtgtgtgtgtttacttcatgtcattaatttctggcatttaagttagtgcctggcacatagtctaccctcagtaaatgttagttcttactgccgagtctactgttctttccttctaaaccagtggggtagatgcttcctttgtgcctcagtggttcattcccttgccctcttcccctctcctcacccttgagttgttagatcctggttttgccccaggcaggtgccaaccccgaggaactcctgaccctgtggtgatgcatgcctgcatgtgtgcagccagctgggcagcttggaaagccatagtattgacttgccaaataaggactagtttacaaaagtcataagagatcactgtcatcaactgctatcactatctattatcctttctctttccaaaacacaatttaggtgcataataaaaacatctgtagaattactctgtcaagcctatgtatgcccatcagttgtgcaagagcctcagttcctacttctaatgaattttatactgattatcccagacctttctgccagctccctaatagcagaggagagaatacactgttggagtcaggggcaaccaaagcagctagtctgagtatagaatttctttgaattctcatctttaagaaccatgctcagctgggcacagtggttcatgactgtaatcctagcacttcgggaggccaaggtgggaggatagtaatggcctggtgtggtggctcatttccataatcccagcactttgggaggccaaggtaagcagattgctggagtccaggagttcaagaccagcctgggcaacacagggagaccccccatctctacaaaaaaacaaaaaagtagccaggtgtgatggcacttgcctgtagtcccagctatttgcagagggctgaggcgggaggatcacttgagcctgggaggttgaggctgcaatgagctgtgattgtgccactgctctgtagcctcgaggacagcgtgaccctgtctaaaaaaaaatggatgatatatccacatgattcagaattgaagaggtacaaaacaataaccaataaactctttctccccactgtgtcctagccaccttgttttcttccctggaggcatccagaagccaattttgttagtttcaacttctggagatggcttatgaaaatataagtaaatgcatctatattcaaccccattttagaagaaatgatacctactatatcagctgctttctgtgcaccttgctttttttctttttcacactttagcatgatgatttttctgtattggcacataaagagcttcttctttgttagttggtggttcttatggcagacaactgaatccaccctagatggttaagccaaaaagggattcggattttaggtaactcatggaatcctttggagggctggaggaacaggctagcatccgggtgcccagaaacaaagccccaagacacacgtagtactagcattaagtggaagccacctgtgctgctgcctccactgaacagcagatgctaggtatttgacttgactgcaactgcctctacctccactcctgcaccgggaaggcaacctagcagtgacacctgcaaaagtagaagctctgagcagagcctctttccttacatttctcacttctaaagcaaaatctggtgtggatgtatctgattagtggtgactaggtgacacatttgcatcttagcttcaatagagtctaggaattttattctcaacttttaaacttggaggtgggacttgtaataggtgaaatttttgcaaatagagaaataattttcaaagtatgatggacagtcacagatatggcaaatgtccactagagctgcttagaattccattgtatggatcaaccacaattgattaaactaatatcttagatggtagacctctaagtgttttctagttttctagtctgtgacttaggcaatactgtattaatgaccatatacatgtgtcattttgctaatgtaaaatggaatataaatttctagcagtggaattgctagatcaaaaggtaaattgtaattcttgtggatattgccaaatggtttctggatgctatactgattttttgcttccactagtgatgttcctgattttttttttttttttttttttttgcacagagtcttttccttttttagattccttctgagccagagtggcaggctgagtgttccctgctactggggtgagttttgggccttgggccaagaatgctgacaaatcagatctgggccataacctatgccaatatagactgtatttagcatctggactggatttggcttatagtttattgtagtccttctagccctaaattaaatggcatcttggggtatctaaaagataatgttgcttccaaaattgatttgcaatgtgggagtagcttacatcttggattgttatgtgttcacaaatgcataaagatgttttcaaagaatggttctaaagaattataataccttttctttttaaaaaagcaaaatcttggccgggcacggtggctcacgcctgtaatcccagcactttgggaggccgaggcgggcggatcacgaggtcaggagatcgagaccatcccggctaaaacggtgaaaccccgtctctactaaaaatacaaaaaaattagccgggcgtagtggcgggcgcctgtagtcccagctacttgggaggctgaggcaggagaatggcgtgaacccgggaggcggagcttgcagtgagccgagatcccgccactgcactccagcctgggcgacagagcgagactccgtctcaaaaaaaaaaaaaaaaaaaaaagcaaaatcttatttctagtgtgtgaactattgcatagattttgccaatatctgaactatggcatccaattgctctggttggttgccatgaaagtttatagtaacataggaagctcctgtttgaaagctcctgaaaaatttaaacaaatgtatataaatgggtgaaaaatgggggctgaggaagaaggtgaatacatgtgttttcttctcatggaagtgttcactattttttattaaattttttttagagacagggtctcactatgtttctcaggctggtctcggactcctgggcccaagtgatcctcttgtctcagccttccaagtagctgggactacaggcacgggcctccacatctggctgtgtttgcagtctttaagttggcatttacctagtgcagttgattatttcaagaaaatacactttctacatggctactgagggtatctgaaaggatataaagtatagcccagggaagtagcatgttgttaggcaggggttagtaactctttctggaaagggtcagttggtattttaggctttgcaggccaagaaacagaatcaaagatattacataggtaattctataacaagagaaaaaataaacttctacaagctttttattgacaaaattcaaaacataataactgaggacttttttttttggtaatacaggtctactcataagaagaacagcattcttactttggggataacattttgcttaatgggattcaaagaatagtgttccctttcatcaaatcgattgcaaatgttcatctgtaaataccatttattttctccttgtgggccatagaaaaccaagcagtgggctggatttgacccatgagcggtagttttccaaccactgatgtaatggaaagaccatgagctttggacctggatgcatgtaggtttgagtactggctctgaatttgtgaccttgaacatatcacttaactttctgaattgggaaggtttatttgtgtataaactgagtgtaatgacacctatctcatggaaaaaatattacccccatctttgtgattttgcattagtattctagttctgtagatgctgatatgatttagctagacttacctagaaaattagtatttaactgattttaaagctgacttttcaagggatagaacactcacatggtcttaaagtacaatgtaaaaacatagctttgcaatgaagagatctggcagtcaccacattaatcaaatgaccaagctttgcaatcagtaccaatggtgggatgttctgacattgtgtgcccctcactgctgtgtacctctcactatatctcagtatcacctgtgtggtgttcttgccagaaacttttgactttaatgtaatcacaataaaacagacaaatccaaaacatgggatgttctgaggacaactggcctggattcttaaatgattcagtgtcattaagaaccaagggggattgttctagattagggggagactaagggaaaatgagataaaaatgcagtgcatgaacattgactaaatcctggatgaggaaaagaaaattcagctctgtaggcattttctggataatcaagggaatgtgaatgtggaccatatgttgtatgttagtccattttcacgctgctgataaaggcatatccgagactgggaagaaaaagaggtttaattggacttacagttccacatgcctggggaagcctcagaatcatggcaggaggcaaaaggcacttcttacatggtggtggcaggagaaaaatgaggaagaagcaaaggcagaaacgcctgataaacccaccagatctcatgagacttgttcaccatcacaagaatagcatgggaaagaccgatccccgtgattcaattacctccccctaattgttcaagtccctcccacacacgtgggaattctgggagatacaattcaagttgagatttgggtgaggacacagccaaaccatatcatgttgtatgataatattgtgttaaagttgatttccttgggtgtggtgatgatggtgcggtggtgtacgaaaatatccctgttcttagaaggtgaatagtaaagtacttaggggtggtgtgtcatgaggtgtgtctgtaacccacttttcagatggtttggcaaaatgggagggaaggagggagggagagagagaatgtgtgtgagtttgtgtgtatgtagaataggtgattctgtgcattgctgctcagttcttagcatagcactcagcacattgcttttgatagggaggtgcccaaccaaaacttgttaaactaacaagtactttaaggttttagtaggattctctgaaatcacacctcagcactgcctgtctgccctctctttagcagtgtcatttggcttaggcatatactataatgcctaatgttgggtaatcagatatgggggttcatgttttcttgagtagctcacccatgtccctctggactgaaagtctctcttgaatgttacagtataaatgaatgggaaaggaaaacccagcatagaggttgacctgcgtgttcagctgttccctgagaggctgaggtacaatttgtaagcatgtacttcagattctcttctgtatttctgttgctgagtttgcccacttggggagggttgacacctcctggggctgtgctgagtaggaggtgcatctctggagttctgactggctggagcatcactgaggtattctcctgggctatgagggctagggccaggataaagaatggtggatgcctttccttatgccttgatcctaaccggtaccctcttagctgagcaggaagggaacagagaaattaatattctcttatattcctgcaggaactcttatggctatatggtgtgagatgactaaagccaatttagcagctacttgtaaaagtaataaaaatggaggggaagaagaaagattctgatgcaacaggctgtgaagactaattcaacatttatttattgagctactgagcatatagcaggcatagtaaagtatgagtcctgggggatacaaataataagaatataccctcgctttctgctgggcacttagggcatagggaaaggagatgggctacagtggagataattatcaaaataccaattgtgctgtgttgcaaggctagggatgtgttagaaagctagtaaaaagtgttatgggaatgcagagaacatgccatgtggaattgactacagtttcaaagataaggttggtcttgaggtgacttgaagaatgagcctggcaggcaaagaaatgggcatctggtgtgactaaagtcttaattagctgtagggtggggaggagagagacatgacgatgttggaaaggtagtttgggccagacaggagggcctcagaagccatgcttggtttcacaggaagggcgtgaagagtcccagaagccctttgaagttggagggtgatgtggttttgataagaggtcacggagggaatgtagaagctggtgtgtgaaggtgtgtgagtctggagacaggacttgaaacagtcgaggcgagagcaaagaatctggattttgctagctgcagcagagggagagtagaaaatggggtgctcttggagaattcttccagcccctcctactaggagtttttacattttcaaatctttctaaggaaacctttaataatacttgagagaagcttatttaaacctttgaacagttctgaaaatgtattacatttcagccaggaaagaaagtattatttcaggcaaactggaacatggttactcagcacagtcgcctaatcttatagaattaggtaggagggaagctatgttagtggccttcaaccttcttccagaactttgttcagatttctcccaaatggtcggtgaatttttctgatttgtatccagcatcccagccatttagtgtacatccgtaagctgtaaggaagttgatttaatctatttctttttttcatctcttgccttccacctgagaaaacactactccataggttcttattctgtattaggaatttgcacaatgtgtaacctaagatggatccagctgggagttggatccagctgggagtgttacaggtttggagtttagactaaagaagaggagtggaatcttttcatttttttcccctttattttgaggaaagcccagtgatttggattgtttgaaggatcaattatatcaaatatctccactaattgagtatctgggataaactttttttttcaccttattttctttagataccattaagcatttcgacccacaacttacagcttttccatggagattttaaacttagaaaactttgaaccttgatgaatgaaaaaaacctttcagaactaacctttttttttttttttttgattcagaagtccatgtgtaagttccaaaggcttataattcttttctcttccttgaggcttgactatttcagaacgttcttggtatgtctcttggaggtttggtgtacaaagagcaaggaaagtaacctatgggcttaactcacttatgtgtatatattctactttggctccaaagcaatgattctagtggtgatatgggaccaagggacagatttcaaggtaaataaggctgtttactaatgtcagattaaggtattagtcttcaagtaccataaatgttttactagcaatttcagttacctgtagtaaagagctttccagttccatgtggtagttatggtaaaggagcaactgaaagttaacttgatagtagattaacactcactgaaaatatagttgttattttttcacataccaaggattacaatgtctttttttttttctatttttaaaatagagacagggtcttgctatgttgcccatagtcttgaactcttggcctcaagcgatcttccttgaggcctcccaaagtgctgaggttataggcatgagccattgtgcccggcctacaatttcttaatattaggagttattttgcaagacaactatctcaatgttggaactacactaatgttggtgtgtttttttccttgtgtgggatagtctgtatcttaagatgtgtaatgtatatattcacaataagggctacattataaaattcagagacattttatttttgaggtaggtttcattcacttaattgagaatttgttgactgtatcttgggtgcctatccttatgctaggagatgaatggaagttgccccctgccattgaagagaagacattttaatgggaggcagagataaacagataattaattataatgtgatacatttggaaatagtcacaaaaaacttgaatatggagattttcaaaagtacaaagaataggatattgaaccctcatgaacccactaccaaacttcaacaattactaactcttggttatgcttgtttcacccatgtgccccacctcctcccttcccccttttattttgaagcaagtctaagacactgtatcatgtgatggacattaatagatacttggatagagtactctgagaatacactgggaaaacatactgtatcgggacagggaaaggagctacagaaaagtaacatttgagttcaatctaggtggggaggaggatgttgttccaggtgatgggatggaaactgacaattattacaatgtcttgaaaaatgtgtatatacaacttttttgttcctctgaactgagcacccaagatgtaatttccaagattaggaaattgttttgcctgaggactttataaaaataattaattcacttttaatttagataaactagaataatccatgagtagtggtaatgactaatctgttctcttttcaccccagtgactttctagactttgaacattagaatccactccctgaaaaagtcactctcctttgtaactagagcaacagctatcctttgtcacctttatttttctctttggaagaggaggaataatcagtggctcacttctgaaacatcatgaataggtagaatttagtaatctgaattaaaaacctccctgtaaactgaaggaagaggaaattgaccagtgggcacacagaggttctcaagggacttttttggttagccactaggtgaaatccttgatatttcatcatgtaccttgtctcattttcctgttgtgaaattgggtgttcagcattgtttttcttgtctgttctcagatcacagaactgtgtggtgcaaagcgggttggttattttggtccaacacagttttacattgccctgaaattaattgctgcagcacaatctggcctcccggtacggatagagagtattaaatgtggtgagtatctcacatttgtatgttttattgtccatggcgagtcgctcatttatgagaaccatttttaatgagtttaaacttttgtggaatttctccttgcttcctccaactcttctgcaaaataaaataagaaaacttggcaggtaggtagcttagtttctttcttttttaaatggggaaaattctgagagtaacctgagattagttcattttaactgatttgcagttaaaatagattttattctttagcaggaagagattgggccaggaattctagagcctgtggcaaataatcacattgactttaattttccacttgaggtatctataatgttattgaaggctctgttagaggagtaacaagggagtttgagtggaactatgccttttctctttcccatacctgccagtgctcagcctttaattcttagtttccaaagcactgttctgatgctagtaagtacttgggtgctaccaaaattttggcagaatgaatttatcttcttaaggttctgatttaatattttctcatcttgccatccctgccctcaacccactgtatgcttgagcactttctacaatttaaacaaaaagcaaaacccccaactattagcagtatttctgctgcctcaggattggttttaaaaatctgtatgaaaaaggtgattattcaaggggtgtgccaaggtcctctgataattcagtttgatacagattactttcatatgtccatacaggtatgtaggaactttttttctttttctcattctgagactaaaaacctcttaactgctcatgcctgtcctgtgaagtctctgatagacatacaagtggattcaggatttatggtgagcccatggaaacctcgtaggacaatccaaatggccgagaagattgccatagatggctggctgtggaagaccaagcccttcacactaaccgttagcaggtggcagtcatcatgctaatctttatcagggggctagcttgtgccagacactttcatttaatcctcatgacaccctactaaattaggtacttgtgtcagtttgattgcttaggataagctgcgataacaaatgtcacaatctcagtgcctcaaccagacagaggttcgttttccactttgcagtgggtcagggtgaccctccagggcagctgccctctatgtggtgaccatgtgatcctggctgctttatcttgtggcacctcccaacacaacacctgttcccataatcgccacaccagggaaagagtatctcaccctagcggttaaatgctttggcccagacatgactgaagttattgctgcccacactgcattggccagaacttgtcacattaatctgcttcagtgcagagcaggtgggagaacacaattctctcctgtgcctgcaaggagaggacaactgcgagtctctactatggctgcacactgcaagtctctactatggttatggctgcacactgcaggtctctactatggtgctgccgttgttcgtatcttacaagtatggaaatttgaactttagggaggttgagtaacttacctaagaatataaggttagtagaatttggagccaggatctacttccagtccccatgctcttaatttctatgcaaaatagccttgtctcaattttttctatttagtaagatgctgacagtaatctgttatacaatattttctgaatgggaaaaatattggacttgaaaggcatctcttggtatgacagaattttgttctttgaaataggtttcttgatggagtgtcatttgacaggcaggcttagtattcattgctgcaagacacagcggccatttgctttgattagttgaaagttgcatcacactgaatttggatttgtggtaggcactgatagtttttattccattgtaaatgatcattaagctttattatagtatcttccaattttatcttctggaaaagttagagctgctttattgtatacagaataaacttttgacacttttgttacttattttaagttagacctaagtcttttacctgatttgtgcccagattgacagtttaatttcctgagggcagggagcaggattgttgaagttatcacttgtgtaaaggattaacagtttatcacaaatataaggctttctcagttttattttataaacccagttgctgccttttacctctgagagtttatatatgtccagagttaattctgaattatcttccttcaccactctctactaatccatttaaagattgattaaataaaattatttgcagttagcatatgttgaataagaattagggcaagattgggccaaactttgagctgccacttagaattttccagtttgttgcttgaaatctattagcttaatgcttgatgacacaaatcttgaaggccaaagggatcactctgtgagaacctaatctgaaaggctgtgctagccctgtcacacccagggcatcatacccagggagttgtggatggatacccttatgtcatgaataacatgcacctgtgtgtatgtgcgtgaccctctaatccctagtccttcccatttcggtaaatgccaccaccatcctcagctgcacaagccagaaactcagcagccatcctggattcctccttttccctcactccttaatagaatccatcaaaagtcctagcaatgtggctccaatctcactccctgttgcctctatctctttgtccctgctagaccagacaaccttcatctacttacctggacaccacaatggattgacatcctagcccctcctctcttctctactgtgatctctcttttcccactggttttttgtttgtttgttttttgacagagactcgctctgtcacccaggctggagtgcagtggcacgatcacagctcactgcagccttgacttcctgggtgcaagggatcctccaacctcagcgccccgagtagctgggactacaggcatgcgccaccactccctactaatcctactaatttttgtattttttgtagagatggggttttgccatgttgcccaggctggtcttgaactactgagctcaagtgattggcctgcctcagcagcctcccaactttttttttttgagacagggcctcactctgtcacccaggctggagtgcagtggtgtgatcacggcttgttacagcctctgcttcccaggctcaaatgatcttcctgcgtagctgagactacaggcatacatcaccatgcctggctagtatatatgtctttttgtagagatgggggtcttgttatgtttcccaggctggtctcaaactgctgagctcaagtgactctcctgtgtcagcctcccaaagtgctgggattataggaatgagccaccatacccagcctcttttcctacttttgaaagtgtgatcttttcaaaatacacagcagattattccatcctcatcctttaaaccctccagtagtctgcttgttgtactttgtaaaacattcaaagtccctacactgatctgtaacaccctacacaatctagttcttgcctacttttccatcctcatctcaaatcttaaacccttgctcactacctgttccccagtctcagtggccttctagccatttctgggtgacttttcctgctgcaggccatatgtccattttatcttgcagtcttgggttcctagggatctgtttttcctttctgcttcccctggttggctccttcccaaccttcaggattcagagtctgtccctactatcctacctaaagtagttctgtcagattcattaattcatgaaggaaccagcatatggtaaaactggctcaagaaagtatagagagtcagatttatttatagtcatagaaagaaaggatgctggaatagaattgctaaattaggtataaagctaattaacgccctacggggtaatacaagtgcagcctggctattgtacttttttctaagatgaaagtatttgcattgccgtcagacaagaattacttgttagctaacagttttttccaagttaatatctaccctttcaggattatcaaatgcccaaccaagagtaaacagtaactcagagcagaagtccatatccctaggaagtgaggtgatccttgggtgggcctgctgggtaatgcttctgcagggcaatctcctccccactttgttctttcccagcatctgtttcctgatagcacttagcagagtttgcaaatattccttacaggtttcactattttttttgtctgtcttcctcacttgtccagtttgtgtaagggggagggaagaggatctgacaccccttgcattgtggggcattataggcactctgtgtgtattggttgaatgaatgaatgaagaggtgcatgtctacgcatgaggagggtgtcttaatcatctgccactctttaatctaaaacgattggaattcagattctcctggaactccagaggagtttttacagaagtcatctcagtctgcatatcatctttcttaggcactgattttcaaccttgtcggcacttgagaaccacctggagagctttaaatataaaataaaaaaatacagatgcctgggtccatctccagaaattctaatttcatatatctgcagtccggtctgagcatcagaatttttaacagctctccaggtgatttttgtatggagacatgtttaagaataaaagctgcatcaagcatttttaagagctttgcttaaactgtgtgtgtgtgtgtgtgtgtgtgtgtgtgtgtgtgtgtgtgtagttacagtagctgcatctgaactagggtgctgtacgacacagggcacatgatttaagggggcacttactctcagggcaagtgccgactctacatttacaccaccctgagagtgcgtgcctccttaaatgttggcactaggtatctctctagccccaccctcgtctgagttggggttaaacagatggcaaaacagctagggcagaaggaaagaaggtgaaaattaaggactggtagagaatttctgatgaggaaatcatgtggtgaacatttgccctgggacctgctgttacctttctttccagggtctgaagttgagcacgtgtgaggactgagggaaggttaggcagaacctagagtagggtttctcatcatttttgtgccaggagcccctttggcagtctgaagcctgtgggccctttctcagaattatgttttaaatgcaacaaagacataagattataatggaaaccaattatactgaaataatcactaaaatagttaaattgttatataacaacatacatgcttctaggcctggcacagtttctcatgcctgtaatcccagcactttgggaggccgaggtgggcggatcacttgaggccaggagttcgggaccagcccggcaaatgtggtgaaaccttgtctctactaagttcgagaccagcctggccagcatggtgaaaccttgtctctactaaaaatacaaaaattagccgggtgtagtggcacatgcctgtaatccctgctactcaggaggctgaggcaggagactagcttaaacccaggaggtggaggttgcagtgagtcgagattgtgccactgcactccagcctgggcaacagagtgagactatatctcaaaaaaaaaaaaaaaaaccaacccccaaaacatatatgcttctttattaatgcattaaataaagcatctaacagtgtttgaaataaccactactttttcaaattagtaatatgcataaacagtacttcaagatgttggcccggcatggtggctcatgcctgtaatcctagcactttgggaggccgaggagggtggatcacgaggtcaagagattgagaccatcctggccaacatggtgaaaccccgtctctactaaaatagaaaaaaattagctgggcgtggtgacacacacctgtagtcccagctactcaggaggctgaggcaggagaatcacttgaacccgggaggcggaggttgcagtgagccaagatcacgccattgcactctagcctgggcgacagagcgagatgccatctcaaaacaacaacaacaacaacaacaacaacaacaacaaacaaaaccctaatgtgataggtgacaaagttaccggtattgctagtgataatacagtggcttgttgcctacattcataatggaaagaaatgctaaatttcagttatagtagggaaaatgaagttgtaatttttttttttttcctaatcaaggtgacagaccccgtgatttcttttcactagtccctttgggagcctgtgaactctgatggtgcaatgacatgattcatgtagtctttggggctgtgttccccaaactggtttatggtctggttgcagtctggcacagtttagaattaggacaaaaggatgagttatttataaagctaaatgtattcaaatctaagattgggttttttttggttcctcttgttaagtgtcctttgtgaaactgctaatgggtaatagtttggggtaaaattcttgacgagataaaacattggcaactttatgttggctttcttcatttctttttttgttgttgttgggggagagatttttcctattttgtgaaatccccaaatttgtgagccactgttgtggtcacgattctactgccaagaagatactgaggcaaatcattgaattccctttgactcctcccttatctgcaaaacagttgttctccacctaggtgatttcgtccctttagggactttcggcaaggtgaggagacatttttggttgtcccagctgcggaaggggactgcctggcatctagccggtagaggccagggatgctgctcaacaccctacactgcagaggacaggaccccctcttccaacaacaacaaacttatctaatctaaaatgccagtaatgttgagactgagaaagccttctgtaaaataaggatcaagacttaggaactctaatcctgctgccttgcttcctgtgctctagttagtttttttgtttttttaatcatacaagaaaggtagaaggattttgcagcattgagtcctatttctgtggcttttgttttcaaagaagaattattttattcaaggaaaaataaaagcagttattctctggttgaattgagggtggggttccctgtgctttgcctatttgacaaaccctccctatctcttagggctaggagagaaatcttttgagtgtgacaaccagtttggtaattcatagaaaagacaggataggaagcccaagggtaaagaaagaagcccaggaggtaaggttgtagctggctctgtgtgtgtgtgtgtgtgtgtgtgtgtgtgtgtgtgtgtgtccacacagtgtctctgtattttgaacactaaatactatgttgggatgtctcattaagctaaggtcaactcatcctttctgactgacgtccaacccaatccccctttccttttttttcctcagtgttcctttgtcaatttcctttaccccctctcccagccctgctacagggacacagagctgctttggacaaagttcgcctatgcaggttcactgactgtacggctggacatttgtgttttctaggggtctgtccctctaccccatagcgctgtcattagctctattgttgctcctccccaaaggttctccccaaccttttgagctgtggattttcaccttatttgtaaaaatctttgttgtgggattctttgacaatctagtaaaagctctggatcttagcaggaaaatacacattgacattatgtaaaaaatgttgccttcaatgtcaggggtttctggacccctagagctggttcatggagcccagtgaagagcccttcttccagagaaatgcagtgtatgggatggatatagaggaggtaagttggaagatgcatagtggggaaattgaaggccaaagaggtaaaataaaagggatgctgcttgctagcagcagagcccagtggattgtggacctcctaactcactcctggggttctacccgtggtatggccaggaaattgaacttatccaccatcctcctctgccaaacatttacaagatcacccttcccattgtaacctccaccccgccatctagcgattacctacccatttcctaattgacaagaggtatttcagatcaatgggcagataggaggataataggagactagatagctttgattactcaggcctgggttgataagactggcctgatttttttttttgttttgttttttgttttcccccaaagtaacttcaggaaaatgtgtagggatggtttcactttggaattatagaacattattgtcataattctttgttaacgtataagtagctggtataagtgaataggtaacaaaaagcagtgggagagaagggagccagcagtcaggagtcaagaatttttgttacggtcttagctctgccactgtattgctgcatgactaaggcaagtcttgctctctctttcctgggcttatttcctcacctgcaaaatgcagacatttgagcaggttttctctagattattttctgaaatgccacagtttcatgctaaatgttcaaatctgtactagaaagaattttaatgttcaggatggtagtatagccttgtggctgggaatgtaggtcctagcaataggctacctcattatgaatctttccttcattaccttttatttgtgtggcctccggccagtttcttaatttctctgtttcaaatgactccctggaggaaaaggtataccaataacacctgccttatagacttgttgtaagcacaaaatcagggaatcccttatcaaacattgtagaaaagcatctacaactttgttatttaatatcgtagccacttgccatgtgtggctattgagcacttgaagtgtggcagtgtggctagtgtgactgagaaactgaatttttcattaaatgatttaaataaaaggttttaaacagtgtaaaatattttctgttaaatgcaaccttattgatttagtaggaccacttttcacttcaaccatcaaattctgtaagacaagggtcaacaacctttttctttttttttcttcttttttaaattttattttattattattatactttaagttttagggtacatgtgcacaacgtgcaggtttgttacatatgtatacatgtgccatgttggtgtgctgcacccattaactcgtcatttaacattaggtatttctcctaacactatccctccccccttcccccaccccacaacagtccccggtgtgtgatgttccccttcctgtgtccatgtgttctcattgttcaattcccacctatgagtgagaacatgcggtgtttggttttttgtccttgcaatagtttgcggagaatgatggtttccagcttcatccatgtccctacaaaggacatgaactcatcattttttatggctgcatagtattccatggtgtatatgtgccacattttcttaatccagtctatcattgtgggacatttgggttggttccaagtctttgctattgtgaatagtgccgcaataaacacacatgtgcatgtgtctttatagcagcatgatttataatcctttgggtatatacccagtaatgggatggctgggtcaaatggtatttctagttctagatccctgaggaatcgccacactgacttccacaatgattgaactagtttacagtcccaccaacagtgtaaaagtgttcctgtttctccacatcctctccagcatctgttgtttcctgactttttgatgatcgccattctaactggtgtgagatggtgtctctctgtggttttgatttgcatttctctgatggccagtgatgatgagcattttttcatgtgttttttgactgcgtaaatgtcttcttttgagaagtgtctgttcatatccttcgcccactttaaagggtcagatagactttgtgggcagtatgattttggtcacaactactcaaccctgttgtagtatgaaagtagccatggacagcatgtaatcagaggatcatggctgtgtgctaataaaactttatttatgaacactgaaatttgaatttttaattttttttattttttatttttgagacagagtctcactcttgtcacccaggctggagtgctgcagaggcacgatctcagctcactgccacctccaccttctgtgttcaagctattctcctgcttcagcctcctgagtagctgggactacaggcctgtgccaccacgcctggctaatttttgtattttagtagagatggggtttcaccatgttggtcaggctagtctcaaactcctgacctcgaatgatccacccatcttggtctcccaaagtgctgggattacaggtgtgagccactatgcctggcctgacatttgaatttaatataattttcacatcatgaaatatttttcttttttctttttttttttttttttttttgcaaatattcaaacattgtgcttgcgggatgtacagaaataggcagcagactggatttggttcttaggtatacacccaagataaataaattcatgtccatcaaaaaacatttataagaatttcacagcagctttatttacaatgggcccacactggaaacaacccaaatgtttatcacaggataatggattaaaattttcaatatattcttttagggtcttgctctgtcacctagactggagtgtaatggtgctgtttcagttcactgtaacctccaccttccaagctcaagccatcctcccacctcagcctcctgagtagctgggactataggtgtacaccaccatgcctggctaatttttgtattttttgtagagatggggttttgccatgttgcccacactggtctcgaacttctgagctcaagaaatctacctacctcggcctcccaaagtgctgggatcacaggtgtgagctactgctcctggctcaatatattcttaaaagtggattgctccatagcaatgaaaaagaatgaactatgtgtacaatacattgggtgattatcacagacaaaaaggtcgtaaaaaaagcttgtcacaagaacaaatactgtatgattcaatgtatgaagttccataatggcaaagataatctgcaagtatagaaattagtacagaggttgctcggtggaacaaagggaggggattactggaaatgaacatgaaggaaaattctgtatcttaatttgggaatttgggtgttggttacagggatatatatatatatatatgtatttgtcaaaattcttcaagtggaacacttacaattccctataaatcatcccaccatacagaatactctttacataatttaaaaagaaatcaattagttgcttacatttaacattgtaataataataaaatacagtaaaatacagatttctggccacaatggctcacattcccatgtagcaactatcaactagagctgtgctgtttcagtatggtagccagtagctgcatgtggctgttgagcacataaaatgtgacaagcacaaattgaggtatgcaaggagggtaaaatatacatgggagtttgaaggcttaatatgaaaaaaaatgtaaaatatttcattaatagtttttaatgttgattacatgttgaaatgataatattgggttaaattagattattaaaattttgccattaaaaatgttttgaaatggaaaatttttaattgtgataaaatacaaataacatttcccatcttaaccattttaaatgtataattcagtaatgtgtaaatatagtcacattgttgggtaactagtttctagaaccttttcacctcaccttacaaaatggaaactctgtattcattaaacaccttcccattttctttttcctacccagatcctggcaactgcctttttttttttttttttttttttgagtgcagtgacgtgatcatggcttactgctacctctgcctcccaggctcaagagattcttgtgcctcagcctcccgagtagctgggattacaggcgcatgcaccactacacccagctaatttttgtatttttagtagagatggggttttgtcatgttggccaggctagtcttgaactcctggcctcaagtgatctgcccacctcagcctcccaaagtgctgggattacaagtgtgagccactgcacctggcctgcccatctactttctggttctatgagtttggctactcttgatgcctcatataagtgaaaccacacagtacctgtctttttgtgaccagcttgtttcacttctttctttctttctttttttttttttttaatgtggctcacattcttttttggcagataacattgaaagactgtgaacagctgctgccattttgatggaacatgagttctctgcccagcaccctccactccatattgtctagctaatgaggctcaatgtcacttgccatttattattgcatttatgctgtttacattttttctaatggattgaggaaattgaggtatttttttttcttttttgagtgacagggtttcactgtcacccaggctggagtgcagtggcatgatgcagccttgaactctcagactcaagcgatcttcctgcctcagcctcctgagtagctgggactacaggcatatgccaccatgcccagctgattttttatttttatttttttaagagaaggggtcttactgtgttgtccaggctggtctcaaactgctgggctcaagtgatcctcccacctcggcctcccaaagtgctgggattacaggcatgagccaccactcccagcctaaagtattcctaatatatctgtatctctatcaaatatggaaaaacaaaggatttttctctcttgtagagggtcaagtgtttaaaaaggagcaggcataattttctttgtggaagggaaaaatagtcatttatgtttaatatacaaagcatttctgtgttcaaagaatgtaacctaagatgaaacaacaatgaagcaaattgtcatcttggatggccactctcattgtctcctcagaccctctaaacatttagtgtgaactcttactttgtttgctgtgtgtaattcaattcagtttgggagacaagattctaaccaatgactacaaatagaccttcttcttgacagacatcattgtatagcaggtactttattgattaattttttcaaagtttcactattaaattttgtgtatgtgtgactaggaaaaacattcagttgagtatggtgactcatgcctgtaatcccagcactttaggaggccaagacgggaggatcgcttgagctcaggaatttgagacctgtctgggcaatatagcaagaccccatctttacgaaaaataaaaaaagaaattagccagcatggtggcaagcacctggagtcccagctacttgggaggctgaggcaggaggatcagttgagtctgggagttcaaggctgcaatgagctatgttagtgccactgcacttcagtctgagagacagaccttgtctcaaaaaaacaaaaaccaaaaaaaacattcagactgaaaatttacaaactacttttacctttcactttttaaaagcttgcatcagtttaagggaaatggcaccttcatgaaagttttccatgataagaatattattatgtatggttatacttctgttaagtgagagttgcttggaaccacctgaccaaagaaagtatgagagaacttcagctgtattttgtcttttgctgtttggtggctgtctgggggagagaggtggttttctaggcacatagctctaaagaaatgccatagacagggtggaagaatgtgtgaagtgacaatgtcctagacaatatctgggagccctacttaagtcctaatataataattgatattcataattcagttagtgtattccattgttccttggaggtatctgttgaatgccagtaaggcactggtcagggagcttataaatactgagcatttatttcttttctccctcaagaagtacttggaagtagagtcatcctcttatgggtagatcagggtgcaaattattttatgtgatcttgtttcatctttttagatcctttttcctgactgagctggagcacatacctgagaccaaaaccatagagttagcttatatttgatttactaagaatctagagtttcttttctcttgcttttttgcttttgaagcccattcctgctttgagtgctggagagctgcccgagattgggaaacattaagattggttactctatttatgtctcttgggcccttggctgattgatcacacagggatttgtcatattgcctgcttcttttttttttttctggtacagaattttgctcttgttgcccaggctggagtgcaatggcatgatcttggctcactgcaacctccgcctcctgggtttaagcaattctcctgcctcagcctcctgagtagctgggattacaggcgcctgacgccacgcctggctaatttttggtatttttgtgtagagacggggttttaccatgttggccaggttagtttcgaactcctgacctcaggaggtccacccgcctccgcctcccaaagtgctggaattataggcgtaagtgagccactgcgcccggccgcctgctgctttgaatcaaatgtgaacatagcaactaaaagtaaacatcatgtggatgttagagaaccaggggccttctttgcctggggaactctaggatacttgcttgctgttgctaagatgttttctggccttagcacagcatcagtcattgaaagtgcagctgtgtttttggaatagagagctgatggaagtgcaaaggcacactgatgagtattatcctgaacaatggatacagatgcaaatcattatgcataatccataatgtccccatttttgtagggttttgtgctacgtgattgtgtgtgatttgatgtgctgagaactagaagtgtgccaaagtatcatttccgctttcagaatagttttgttagaattttgaaagatgagtaaatataccagaccgttgcttttcaactctttgtagcattttgagtggctaatggttttgacagaagaatgtggctgaatgatagattgattgctctgacttgatattgttttccttattccattatgaaaagacaaccagagattggatgtgaaaattccttaaagaattacataggatgagaaactgttctacccactaagtttgccataggaacaagggaccattctgtagagcactggtaaagtaccagcttgcctgcattcaaaccgtggctctgccacagatgagttgtgtgatcctggggacattacttagctcctttatgactgtttctacttttgcaatgagggggtggtaatgatagttttatcatacagagttgttgtgaggattaaatgagttaatatttgcaaatctttaatactgtgcctggcatatttaagcattatatgaattttacctgccaccatttgtcacttattattgtattatacagtgtcatatcctttttcttggttattgaaggatgaaatgggagatcagtcccaaatctgaatttattctgcgatttggcaacattgaaaaatgttaagccagaatactttggttaaaccatagcattttaaaaatcaggacgttattataggagtactcattgtatctaaatctaaatttatatttagtgctctggaatttttcctcaaaaatgattcatcgtttggccattgagttccccttttttgcagtttttaaattaagtctgactagagcttctctgatttctggtcccaaagaattgcctctgcctcgctttatgatgtcaaagaatgatggtgagatacgatttgggaacccagctgagctgcatggaactaaggttcagattccatatttaactacagaaaaaaattccttcaaaagaatggacgatgaggataaacaggtaaacagtttgttcagatgtgttcatttgattctgaccatgaaaccgcatgtagcagggcctcgtatctactgttcagcttccagcaaatctcaccatctggaacccaattacagacttggaagtgagccagtaaagttttctcctagcaagaaagagagaccgacacatatgaatcaccaccacccacttaagggccctttagagcctactttaaagtagaattgtgtctaaaataaggctaccgatttaatacatttattgatttcactagctcagtggttttctaaatggattcttggaaatgtaacttccaggagtttttaataggttctcttctccaaaaagaagtctgtagaaaaggtttctcctattataataaatgtgtttggagaatgctgcttcatattcccttgttgagggaaggactaaatcctcagtcttggaaattcgtagtgcacattagcacggtaaaagccctgagaagttctgcagtgaagagacctggaaatgtgtgtttactaaacttctttcaccaggaaattctttcttggggaacatatttggaatactatcttgggaaatgctgccattacccatttagcaggtttggaaccagaacagggaggataggcttttaaaattagaccactaattgcaatggtcagatgatgattggtggagacaacagtataaaatctcagaagagtgggcagatccagaagaagtaaatagtctacacattggtgtaccctgcaggcatcaaggtatagctcatacttccagcaaagatactgaatcatgcagagaagtcaaattatgttcaacatagtgtcttctataaggtaaagaaatttattataggaacacttgaggctgggcacggtggctcacgcctgtaatcccagcactttgggaggccaaggcgggtggatcacaagaggtcaggagttcaagagcagcctggccaacatggcaaaaccctgtctctactagaaatacaaaaattagccgggcgtggtggcatgtgcctgtagtcccagctacttggaaggctgaggcaggagaatggcttgaatccgggaggcggagattgcagtgagccgagatcacatcactgcactccagcctgggccacagagcaagactgtgtctcaaaaaaaaaaaaaaaggaacactcgaatgaaaatgtttttaaaatgcaatgaatattaaatgattatgttggaaaactaacttctgtgacttaccctgtgatgttgtgtagatgaggtgttgctacagaagttttatatggatagttaggggaggtgtagcacatcctgttaaacaattccatgtactgtcactttcataattctgacacattttaaatcagttcttcagggatatatttaaaaaggaagaggtataggaattttcagtcaatattctttggcatattttcccaccagcatttggagaggaatgagggtccactgtcccacggtggttgatgccctgggaaatttccaggcccagtccctgattgtgtgaatgagaatacatcctttcacttcaggctgagtttatgcatgccccacccaatctatgggtgtgagctcatgctttagagcaaacatattttgctttttcttgaagaagagtatttgatcagtatttcagattacatatttctctttagactaagggagcctatatatatagtctgtgtgttgatagaaagcattgttttggctgggtgtagtggctcatgcctgtaatcccagcagttggggaggccgaagcaggaggattgcttgagcccaagaattcaagaccagcctgggcaacatagcaagacctcatttcaaaaaaaaaaaaaaaaaattagctgtgtgtggtggcgcatgcctgtagtagctactgggggtgctgaggtgggaggattgcttgagcccaggaagtcaaggctgcagtgagctatgatcacgccactgtgccccagcctgggtgacagagcgagaccctgtctcaaacaaacaaacaaacaaaaaaaagcactgttttcttggtacttgaatactccaaagttaccagtctactagtaaagttttttttttttttttttttttttaaagaggaaactcagcagcagataaggttgcttactttgcctagggttctacatcaggttcatatttgaattgagattcaaattgtagcttgttaagatttcatcttagtgtttgggagtaagctggttggaatggtttacctataatgaattgttttgcagtctctcattgttaaaaaaaaaaagctagcattttactttgacatggtaagctccaagaatattaagtattaagcatttagaaatatatattttaatattcacatttgctggaagacttgataagtataaatccaggaaataaatttattaatgaatgaaaatgaaatctatccacagagagatcacaattgggagcgggtatgaatgttatttcatgtgatcagtgtctttcattttccaaaggaaaatattattggaataaccaaaagtgtttcaggctggttttagtaatttaggtaactcagcactgatgagattttattctctgggagactttttgaatcctcagacactgctgtttaaccatgctgcatttttgagaaaacatttccccccatttgttaaaccagctgggtcaccagcagtagagttgcgttatgcttcctgactgcagctcagaacgccaggcttgagtgagcgcctctgaactctgatctggttctttgaagcaggaaacacagtctcccacgatgtcacccctcgcctcccctccttcttccccgcctcattaccagagggtgcccttgagccatggctacagcaaactgcggagcagcgcagaacagatgcatccaggtaagaggcgacctgggggccagctgtcccaggcagtgtcttagagactccttaatttaccaggcggtaacgcttcaagctgcttaatttcctgatttaattacccctgtctttggaaacatggctcaatttaattttatattctcaagcaaggtttttttttaaaaattgatttaaacatatttgagtaatgtttcatctcctgtcctagaaactagttcgtctttagacttgtaaacagctagatgatttaatctttcatatacagattttattgaatagaacataccatattaagggcttgtattttttttggaattgttattcctttctgtaagcacaccaaagatatttatatagtaactgctttaatgaaatttcttaagaaatataactgcaaaagcaaaagagttgatccaacctttgaagactgagcacgtaaatgaaaatatataggtcctgtgctttggaataaggataaaggaaatgctaggggtagcattttgctgaggggtatgtagcatgcacagttgtggggttgccttcttgctcacatttatgctctgctggcctcgttaggtggtaaaatacgttagttctgaggatgacttgcagagttggctgtttaggctgcagtgcctaaagcactggaaattcactgcagcatcttgtgcctcctggggttcagactcctagtttaagatatgaccaattaaaggtattctagaactggatatctgtaaacccccacccccccagttttgttttgtgggctgtggccccaaatgacccagtttctgcaggtttttactgcattaaaaatagtggtgacttttagagggacacagaaataaaactgcgcgctaggctgaataaagagaggctgtaatcttgcagagagaagcaggcgtggcataatggcaatagcttttgattggaagcagaaggtgtgtgggtttctgtgactagctgtaggactttgggcaggccattgaacatctctgaaccacgattacctcttctctcttaaaatggagtaacagtatcctagaggggtattagaagattaagtgagaatgtgagtataaaatctgtttggaaattaagtcctatgcacatgcaagatgatgttgctaatggatagtaacaaaaaaatcactgtcctgtaacttgaatatctcagtggggttagaaactaaatggagttgagaattcttcattttcctcttatagtttccctgatctgatttccctattttcaggagtgggttttttttttttttttcctatttctaatcttacttgggtttggaagttggtttttaattcacaggtgaaactttttgttctactgagtcagcctgtcagcaagttctacctttggtattccttagaaaacttttctgttcctcctccttaatgccccattccctcctcattccatacaaattgggcttccatttccccagtggtaaggaagcagcttgcttctctccatctttcttgactctcagcagcctgtgccaaagctgtccatgccttcatttcttttcatacttttttaaaagtgaggtaaaatatacatatgataaaatgtacccgttttatttgttcatttttgagacaggttctcactttgtcactcaggctggagtgcactggcgcgatcatggctcactgtagccttgatctcctaggtttaggtgatcctcccacctcagcctcctgagttggtgggattacagacatgtgccaccacaccgggctaattttctttttgtatttttttgtagagatgggatttcgccatgttgcccaggctggtctcgaacccctggactcaagcgatccgctctccttgtcctcccaaagtactgggattacaggtgtgagccacaatgcctggccatgcacatgttttaaatcttcaatttgagttttagcaaatggataggcccttgtagctaccactttgatcagtaattgaacatatccattatgccagagatgaccctctccggtcactccctgccccctaacgcaatcactgttctgattttcatcaccatcattagttttgcttcttctagaacttcatatgaatgaaaacacacagaatgactgactgtactcatatgtgtttgccatctttccttcagcataatggttgaaatttatctgtattgttgtatcagtagttcattcctttttattatttagtagtgggatatattgtgtgaatgcatcacagttcgacgatctgttctcctggtgctggacatttgagttgtttccagtgtttggctattatgaataaggatactatgaacattcatgtatgagtccttctgtgacatatgctgtcatttccctggctcctaggaatagagtcactcagttttagggtagttgtatatgaaactgccaaagagttctggtttgacactgaacttcagagtgatgaaatctttaggtttttttttttttttttttttttgtacacctccccttggagaaagatggtacttccagttcttattaaacctcttgtaaggggatcaaagaattatttgttttgcactgtattgcatgtttggggtttcatttgggaagaaagagagttgagtaatagctactttttaaccttctgaattcagatccaattaaggaaggagccagaagtcagacaattgatggcctgaatatcagctttattactgatatagctgatcagagcacatgtcttagatttgtgaccagatgggctttagacactcacctttccagtcacaggcaggcttggccatcccagatttcccacacaagtaggaagagaaaatctgcctctccaaaaaaggccccccatgcagctgagtcttcatccaagccctactgatgagataggtctgtctcttccaagggaaggcccttgtaggtgagggatagaagccaagggccagatggtggcctgttcccccatgtgtctcccctggaagtagaagtagaagctcttatgggaagcagaggcacgtgggattcacttcctaaggaaagctcatgactgctagcaccccaaccatgccacagttcactgtgtttcaaaccttttggcagagcgcaattggtattagtgatttaattcagtgctccatcaacacagaatgattttaaaaatcctacttctcagaagacaatggtggcctaccagctgagacttactttttaaaatttggattatgtgctctctatgtatgtatgttttgcagtttttatatctgtattcattcttagcaggttctgaaaatctacttgatgggttgccaggcaattgttttgctattttaatgtgtgttaatgtattgtaacattgtgttccagttactaggaagaaatacaaaaagcagatgtgagcccaagagtgatttatcattcttgatgtgctattgttgtaccttctttattttaaaaagagcaaactatgttaaacatgaggtcataacaggctgctctgctctctacctaattttatttgtaagtaagctacagaaataaaacattttacttatttatatattttcaaaaacttgaactattaacctatagagatgagaaagaatttcaacttgggtgataatttctgctttctgttggagctgcatactacctggttatgtttaactgtctccctgccatattggtaaggtcattattaagtcttctggaaataaaaggagtgaaaacatacattcatttttgtggcttaaaaagttattttaaaggcagcaaaattgttttttaaaagtttggttattgaatagtagaataataaatataaaatatatttattcattttcgtagtcttctctacatgattttacattctgtttgatttatttttcaaaaataatgttggttcttagtgttcaaaatgcacattagttttcttcttggggaagtggatgatcaatggaagacatttacttaggggggatatatagaatttacctcatatttagaatttgaacacttatgacacttttctagctattgttgctttctatcccaattgaagttctcactgttccaccttcacaatttattcctaatcataacccagtgtaaatatttttctgcttatcatgaattggttgaatgtctttagattgtttagtgaaattgtgccaaagagaatcaggggttgtcagtcctagatggccctatgagtattctgttgccagttctttcctgaaaagcagatgctgtatcagtttgaatgtgaagtcataatttttgaatggaatctttgcataccatactgactttcctttctgctgtttcagcaccttatgaagctaggcagccccttgtccagcccgagggatcctcatcagggggcccaggaaccaagccccttcggcatcaggcttcccttatccgggtaagtgatgatgcagggttatgccaatgggacagtagagtcaagctttgggcttcggggacatggctttttgatggaccctttttcattgcaaggaagatataaaactgatccttcatgcaaatattgcatgtcttgtttggttgcttgtataaattactaaatcttttctactgtgtatgtctctacgccttctcagtgtctctagaataaactaggctgcttcttgatctttagtatatctaaaatgtccctctgccttcacctatctaatcattagccaccactttcaggagagcttcactttttctaaagcagcccatcttgtctctgccttattctttattattactcatttaatgcatagttaactgttttccatttgttttgtgcctctaattacatggtaaacttttggaaggcagaagtagttctgtattctctctcagtgcctagaccaagagaacagttattgtacaatggcagcagctgctgtttccttatgtaataaatacaaaagaaatattatggcaaaagcttctggctataccacagcttagacaatttcagcttccctttctgcagtgttttcctttggataaagagctcttattttgttctctgtctgcagctgttgccttgtgtagtgtctctgggtcctgtgctggggaagttatattctcaaagaagggtgtgtgtgtgtgtgtgtgtgtgtgtgtgcacgcgcgggtgtgcaggtttactatttgacactaaagaggaagtggggcagtttgtataacatttcagtcatctaactcgggaataaggaacatttttgcacaggcacttctactcagaatagaagggtggtgtcagacactcccataaagatgtgggctgctaggttggaataggataaacaaagtctaaagaaggtcctggggttcatggaataccttctggggatggggcactgtgttagatgtggtgcagaacttgattttctaaggtgggactctgtgtacaaataatttcttaaagataataatttagccataggctattttttatatttaatgcttcctacaaccataagatctagttactgctgcttctaatagtataagtgagttgactgtggttgagagaggtcaaatagctggtttaaggtttcattcataactagtcagtgacagagccagaatttgaatccaggcctgtccaatgtcaaaacctgctcctttcattactttgtcctacattagagtcccatattacaagaaggctaggttctagagttgctacataaagaaacgttgggtgtagtaaaaaatactcttgaaaaatcccttattgataccacactggagaaccaatatgccatttgctcccagggccagtacagctcagttttatccccaagttggaaaacacatttgtttcttcagctgagctccagatgtagtagttggctgtgtttagagatcctgtggtacaaaaatatgtgcctttaaacacgagaatcacacccactgtggagtgaggtttacgttagaaaaggtatcagtaggactgggatttatccctaagctctccaaaatgtggctgtgtaggttcctacagagtgtgtcctgggaatacagaggccagatcctgaatggttaggatgatagtcaaactaccagtgcatactgagctttacagcagtgtgactgggctcactagaccctttctacctagcccctggctggcatgggcatggatgctcatttggattggcaccctgtggcttctcttctaatctccatgttcccttttctgctgacaaacatgcttcatgagcccttcactcaactaatatttagtgaacacctattaagtgccaggcactgtgttgagaatacaaaaatgaggtataacactaacagtttctgccctcatggagctactggagagatggtcattaaccaaaccaccacaaagtaaatgtataattatgatatgggatatcagtaggaattacactgtactttaaggatgaaaatgggcatggggtatgacctagccttgaggggcaggggctgatcaaagaaggcttctggtgggggagcaacattcgagttggaataagggtacatgggtgttatccaggtgacagggtgggagtgcgggagcaaggtgacaagatggagggaaccgcatatacaaagacatttcctatgggtttgccattttatgaacattatctctttcagtgcccacagctatcttatgaaataattagtgttgttatcccattttcagatgtcagaacctgaggtttagagaccttatttaatttgcccaagttcacagctaggaagtggcagggctggagttcaaacactggtcaaggttcctcagtctctggctcaggaaccagatagatggtggtgtcacctgttgagctaggaagccctagatgaaatactggcactggggaaagatcacaggttcagtgtttgatgtcaggaactgaggttttgagatagtccagagaagctgttgaagaactggtagattacatgggtctggagcttgggagagagcttaggctggacataggtatttggcagcaattggctatcagaaggtctcatggtatagtgcagaaaaaaccagacaggtgctcgcccaagtccagcaaaactctgtgtgaccttgggcaagttccttctcttttctgtaatacaaatgacttcgaatggatttaacagcccattgtaacaatcagcaacagtccgattctcttaatgtgtctgtggttttcatggctggtgtgtttttctttcctctgttcttaggtttccttcttatgcctgttaacttggtttggctggactccgtgttccagaaagcaaaatgccaacctggattagtcatgtagatgaggggatttgaagtgaaggttcttggtgataagggattaatgtttactgggcatggtgctaggcctaggctggggtgactaatccccctcatgttgtcacgttgatgtgccgatggcaaccttctttctcttctaactagttctctggccttgtattcaagttcttcctgcctgattacaagggggcatgtcctctgggtcctgggggaagcctttagggactcccagccagtgctgttgcaacccatggtgttggcattttagaggtgcttatgccaatccagtgcctaaacattggaatgatttgtctttttgcttactattttaggaatttcacttttgttcgggtgttggatttttttccctttgaaatttcagacactaagcatatcctatgttggtagatgattgatagtgctttgtaaagaaattataagacttattttctgcttcatctgttatcatatgtttagatgttgttttgtggtttgtttttcacaaattaccctcaacatctagatgatgtagtcatttgtaattttgctggcaaaagatttagaattgcacgctttattcctactgttctcagctgcctctgtttttgccagggtcatgagaaactttatgttaagccgttgtctttattgtctccttggcagctgtggacactgaccatcttctcgaaatgctctcatcatttggtgtccattatgcctgctctcctggttttcctcatgcttctatggctgcccctgcctcatttgtttcaatcctccttcctctgccctccccttgttatgctggagactgctgggcctacttctcactctacttactctttagatgtgtggatgctcatgaccacatagcaccatctgccagacatcttcactctaatgttccactgtcactttcagctgacatgtctttctcataaaatcagctttcactcttccactcctagctccacccacccatcagcacaggccagaatgctggtcattgtctttgacttctctttctctccttatgcctgttcagtccccaagtcctgaccataccacttttcaaatagcttgtgtctgtccatgcctctgtacttcttcgttcaggccattatccttttcactgattgtattgtattagcctctctcttgtttcttcttgcttccacccttgccttcttccaattcattattctcattgcacacaaaaacaatcttaaaaacacaaatctaatcatcctgctgacttgattgaagcctgtccctctctgcccatggctcttaacatgtcatccatgttgctgtctggccctcgcctacctcctcggccacagcagctcactgccgctttccctccactctctggccatttcccggatggtcagtgttctctgcgtgggagccttactcttcaccctcacttttgccttctttgttttctcctttgtctcaattcatctatgcttttttccccattaagaacgtgaaacgtaagtgttttctgatattttcttgtatatgcgatgtttcctttttttttcattcttaaaaagaaaaagatctattgcttgtcagctcatttatgtgtgcaactcagccagagggatgggcgtctgatcattattggtttcccatctcagaggcaaccagggttgcctgtttcttttgtatcattctaggaacattttacgcatgtacatgcaaatataggtattcatatatattaatatgtgtgtgtatgcactatatgtatttatatatttatttatttttttagacggagttttgctcttgttgcccaggctggagtacaatggcaccatcttggctcactgcaacctccacctcctgggtccaagcgattctcctgcctcagcctcccgagtagctgggattacaggcattctccaccatgcccagctaattttgtatttttattagagacggggtttctccatgttggtcaggctggtcttgaactcctgacctcaggtgatctgcccgcctcggactcccaaagtggtgcaatatatttttacctgaatttagggagacatgtttggcaaatgaatatattcttccagctagattgcactagaaaaaattatcttttatttaaaaccaaaacacattcacttttcaaaccctcaggatactgttgtgatgttttctttgctttttggagggatgaaagtaacagttttctagaacatattctcaacactcactactcttcttcagagatgaaaaaatgacaaacagaatttagatacctctattactctaccattcctcagggggcttagctatatttttggtgtaagttttctaatgatcaggtaggggaggggatgttaggcattgttagccagcaccatattcatctcgaagtgcataacttgaaaaatgtttatttaacttagttatctcctttcctcctcatctcagtttcttgccgtacctcctcccctagatataactgcaggtacttacggccagaagcaggtgatctccactccttgggtcctcttggaacccaagagaaaaggcaagtatatgaaagatgattaaagaaatgaatattcctgaggctctgtcagagtggtgttggcctgagtcaaaagataattgatagtcaccacaaataaattgttcattctaagagctttgatgaaaacagcaggaaatagcctttgggggaggctgatattgcaccgagagatcttcttgtggcatgaaagatattttatgggtagactggaccaggatgcaagcaggataaggagagcggaggagtgagaatgactgatggtttgggatgggattgagtgaggtgggttagagttgagtcatgagagagttggtcatctgagtttggaagaagagtgaagcaggtaaacaagcggggcatactgggtactgtcttggctactctggttgtctaacctaatactcagcccagggaattgacccacagagcaggtcaggcccgcccggattcttttggggttcaagaattatttaccaaggcattacttggtaagtaagtgttcatacgaacgtgtgtgagctctcaaacacacttgttcttcagagcaaatacagattttaaaaatatgtcaaacattcaacagatacaaaagggcacagtgaaaactgtccctaccatttccccgcacagccactcatcccaggggcaactgatatgacccatttattttgtatagtactatacaaaacatttatataatattgtatatgaatatcttttttatatacaagtgaaaataggtattatatataattacatgtaatatatgcaaaacacagttatgcttttttacacatatggtggcatactatacatctaacatgcatttagcactaacaataagctttattaacgttctatagcagcacataaagtacttcctcatctttttgttttttacagatgcatagtatttccttgtctgcgtcttgtgtaaatcatttagccagccccttttgattgacatcttgtacttgcaatcactgcgttgtttgcagatatatgggagaccaattcctagaaattgaattattgggtgaaaatgcctatatatttgtaatttttgataacgactttcaaattggaggtatagcagcctatgtacttgccaacaatatatgaaaatgtctgttttctcgtacctttgtgaaaacaatgtgctaacaaatttatgggtctttgccaatctgataggtgaaaaatgatagctcactgtagtttaattagcatatctctttattagtgaagtgaaatatcttaagtttatgagtcacttgtatttccttttctgtgaactgttgattcatatcaagtgcccctttttcttttgagtattggtttgtcattcttaatggcatgaaaccagaagctggtctgtcttttcctttggaccagagatatactggagtgtgtgtggaagatttctccctgagtggtgagaggagatgctggcacctgaggctctcgaaggaggttatggaccccagctgcttcccagttctggagaaccccaggcctgcctgcagtgcagatttcttgtttataaggtcatgacagtaaagttgaattacttagtttatgggtagagattagggctaaaaaaaaatcctctgttgttagagatggtaaatgtcaacactgtgtgtgtgcgttgatctctcagcattgcttagacagctaaattatgttcctttcactgaaatgggtgggaggaggagatagaggtagagataaagatagatagagggagagagtataagtgtgtgtgtgtgtgtgtgttaggaagagtgagtttgatgccttttctaggtatgtatgtgccttattcttgagatcttctttcaccaaattcattcctcgtttcatttgagaccccagctggacgtttataccatctcctaaggggtcaaaggttaacatgtcctccaggtgtcctacttcactgagtctactatagaacccacatatacctgaacggacactattgccacaaggaggtcctattttttcatagcctccagtctcctgcttacttattttcttcacctgcttgtagttctctttctgattttctagcccttaacttttgaggaaggatttctagctcttaacttttggggaaggaaacatttaatctcaactgatactgaagtttattttctcagtgccaatcttttctacttgtttcttttttcttttttccttttcttttcattgattgattgattgattgattgagatggagtctcgctctgttgcccaggctggagtgcagtggcgcgatcttggctgactacaacctctgcctcccaggctccagcaattctcctgcctcagcttcctgagtagctgggactacaggcgtgcgccactgcgcctggctattttttgtatatatttcttttagtagagacggggtttcaccatgttggccagggtggtcttgaactcctgacctcaagtgattcacccgccttggcctcccaaagtactaggattacaggcgtgagccaccatgcccggcctctacctgtttcttagtgtattcctcaggtgctcactgtgtaccacacttcttgacaataaaagagatgtttagttaatttagcctcccagaggtagctgaaaacactggtttgaactgctggttccaggcagtactttgtaaatctggaaaggatagtagcttattccccaggaccttttggtctcagttatatgccaggctatggatatggaagacttctttacaactggcaccattttagcccctgggcccatcagtctttcccttgatctcaggcgagcagggagtgtcatgcccccccagttgcctatcccaacaatagtcactactgactgaggtgcttctttggtcccagtgctgtgctggcccttttcagtcctcccaacaatctcacaaggtaggtattattacatcttccatttgtccatttggaaatacttaagtggcttccatgagtcagccaccatgccaggggtacactgaggagtacacctatagcctcttgctctctaggtgcttgcagtcaaaaggaggagatagatttgaatcaaatgatcccacctatgcatgtggaattaaaaactgacaattgccctaaaggccttaaaacatggtaccatgtagcaaaggaatccagcctatagctagaaagtgagagaaggctcctttaacaaagtatgtgttgagctgagctgtgaaggatgaatagaagttaaccaggctaaggaaggatggtcctgggaggtgaggagaggagtggagtgtttcctgtagaggtaagagcctctccaaaaccgcacagcagagctgggctgctgagagagctttgcttctgtcacaatcagaaagctacagcattgggaaactgctgccctagtgtcagctccaaccagatccacactacaaactaccttggcagccaaatgaaagctttgttccctgcctgtaacttgggtctgcatccgtcttccgtgggtgtatttgttgagtggaacctaagtcctatttggaattctagcagcaaaggtgttttgacagtggagtttttagctagccagcttgtgcagtgctgggacttatgctgacgggtggaatggactcgtgacccagtctctaccatatttcacagggagagcagatacatttgaagaactgaaagaaggcagctgtggctagagcctggagtgggagggagatgaggtcggagagggaggcagggccctgtgggctatgtgactgccttgcaggtgggagctgatggctcagaagttaatttactggttagtaagtgaccatgccaaattggaacccaagtctgtctgcctctggaacctgtactctttttgcacctccagtcagtagcctcattctccaaagcattcttgaattctgtccaagttgtggatgcatctgtttcccatctgaactcagactgccttgagtgtgaaggggagaacgtagtgaagagacaggcagccttggcctgaccagcaaggacaggggtgggaacgtcatcgcttcgttaatggaagtctgcagccttgtcagagtctcctcttactgctgatttctcatttttcttggctttctcctctaagcagagcacaaaatcctgataatagtgaaggaaaagtgcccttctggaacagcaaatcttggcccctgaggggagaattggaggcagtggttactaatgagcatttcttatgttaatcaaaatactgttagcgccacatactgcaatcacagtaaaatgattacatacctggattgtatggctagctctaggattcttttgtgatgacgtgccagatgcttacctgcaaaaattatgtgagaaataaaatggtgctctgtcagtatgatttaatagttcgccagccaaaatctaaaactaaactagatgatggggaggaaggtgtaatacagcatagtcatagctcaagcacagatcctcaatctgcaaaattgcagcaatgatttaggcattgcagtgaggttctttttgtaataaatgctctatttttacaggatggatgaacagatagagataactatagagcttgatgatcaagtgtacgtactttggacccagtttgtattctggctctaccatgtgccataggtgtgtggtcttggtaaattacttcccttacctaatcctcagtttcctgttctgcaaaatgggaattaccggatttacctcgcagggttgtgaagatgaaaattgattgtgtgcattaggtacttacagtgcctggcacttagcaaagcaatgaatgcttgttacctgacattcttctgtgtctaagtgatcgtttcaaaaagtatagcttattgtaataagcagcaactgtgtgttgcacattaggctcagagagattcctacagtttggcagtcagccttctgaactattgaaattagatccctaagtaagttaggtaatatgtggttaaaggcatctttgtgggtttatttccctgaagaaacagataaggttaaatttctctgttgggacttaattttaactaacttctctacagaaaaaccaaattatttattgcaacttcctgtgaatctataattattttgaaataaagactagaaagaaggagttttttaaaaagttctctgacttcagaggtaagggagagggctcagcctttatagtgttggatgacattatgtgataaatgcatataaagttcagcttcagtcagcttaagagaactcaggttaacctttctctgtctctagactgggattgagaattttttcgaatgtttgtttgtttactcattcagcaaataacttattgagtgttttgtatgtgttagtgacttttccaggcatttgggatatagcagtgatcaggatagacaaaattttctgtcctcctgggttttatgggatagcatggggtagggtgagaggcagagcataaacaagattgatcaagcataatttggaatcgtttcatgttaaaacaaaattgctaagctctgtctccttttctaggtccttttcttcatttctcattgaacactttccccacaattttacttgagctgtcttttctttttaactgggaatctccttcaaatccatggaagatgaacctatattactcaaacacagaaagactactataaaaatgaatcagcatcctggtcctatagattgtctgcatagataatcaaattagaatgagaaagttgtttgggctcataatggtctaatgtcattggtcagattgcaaaaccacaatagcttcaggcttccatctccaggatgggctttgtggttgtgaagggcagatcttcctttcctttgggtcttgcttgaaggatacattcattgagggaacagctgctataacaaataggccccacattttaatgactttgcacagtaggtatatttctcactaatataatagtttggcaggccgctgtcctcagcatggtgattcatgcaccagagctccttctgtcctgtcactgtgccatcgtctgttcagtgggcacataggaaagagagtagaggagtgctacagggtactagtcctgcttggaagtagggtaggccactggtgctcacattgcaatggctacaactcagtcacatggctgcatgtaacttcaagggaggctggaaaatgtcatttctggttgggcagccacttagtgacacctctacaccaggcatagtagagcatgaattattggaggagtctgctgtaatcccacctatcagcactgccaccacttgcttctgtgacttttttttctcagccccatgactgaccaatttccttgatctttctttagacaaattgatattcacttgggctatagtgtagtctcaccagcccattagctatccttttctttacagtagtcaagtcttctcacatctttgctaatgagatcgttttgatcagcaattgccttgtggtagtcttatttccaaaatatttttggcggaggaggcatcctcagatattcactgtgggcttagtatgagcttttgctactccaaatagtttgtttactaaggcactaacaggacactgttaaaagatcattacccctcataggtgaaatggctggactctaaaacagcatttataggatgccttcggggtaggtttatattttaaacagaaatgttctatgattgaaacaatacacacacccttcttaagttctctccaacaatgcttccttgcaattcatattatttagctttgtttgatttttaagatagtttgatagtaggggtaaatgttaccttttgggattttattaatagtattactttttaatgagtcttttgaagtctttcattataaacagcctgctttccccagagataataacttgccatgccaaatatttgcatttcacttgaaacaaaaccaaggggttgaatgttttaaatataagcaaatctaattctcctgtgtctagagaaactgtataatgaaccatatgtatgtggcttaagcagacagatgtgaaagatttctccctctctccttttatttaaaaaacaaaacactggcagagctcaaaattggcaccaagtagcaaacatctctgctcagccaacaaaaccactggagctggagttgatggggggaggcctctttagggtgcatgcaaaagtggagcttttcctggtcctggcttctacttggaaagctaaggctccacagcttatttgccctcatttctcagtgccttcaggcttcaaaatgagccattctcaggtgactgacttttcagatctttgagaagattgttgtggttgattgttggactggttcagaagacatgggtccacgcatctgggtcctgcggtgacatggcctctagctgctgacagagtggtgctgagctaccaaacagactcataggcttcctttcacaaagaacatcatagggcagtgtttccacatctcttgcaatacaagacatacctctgaacttcctcaagcttgccaataagtagagctcacactaccttttagtatctgtgatgtacctgccagggactataggtgggataaagtatctgatatggctcctgtccttcacattgaaacctgggtgaagatgtttaggaacactttaaatgttcaaactgtggtacttaccatgactatcataaagattcatatatatttttttgagacagggtcttgctctatcacccaggctggggttcagtggtacgatcatggctcactgcagccttgacctcctgcgctcaggtgactctcgcacctcagcctcctgagtagctggaactacaagtgcatgccaccatgcttggcagtttttaaatattttttgtagagatggggatttgccatgttgcccaggctggtctcaaactcctagagtcaagtggtctgcctgccttggcctcccaaagtgctgagattatgggtatgagccaacatgcccagccaagattcatattttttaagacgctcaaatcacttggcttagtaaatcaatttcaagcatacagcgagaagcaaggggaaagagatgggggggtaggttagcacacttagtgcaaaccagtagaagggccactctatgggttacacagaactcatgtgccctctccctttgtcctaaggcctttctaggtttaggagtaggaactctccttgcccacttaagttttcttggaagaggggttgggttctcatgggaatctaagaaatgagagccaaggaatggcccactggtctgtaggggtgggagttcttggctgttcatgcttgttctactgttaacaggccttgccctggttgtgttaagtttgctccactgtccacttatctttaggcttctgcagcctttcttgcccccccccccggctttgtgtcctttctgtacctacctcccagcttgtgctgatgcttggttctggcgccctcataactttaagtcccacctaccctttctctatactacagccccactgagcatctgtttagggtctactttctcttctcattggccttgatatttctcatccacattcccaagaatgagcatctgacctaagcccttgtcagagcatctcaaaggccagtatactgtgtgcccatgaacccttactcccactcaggtgacgccaggtgtgaggtgggtcatggtgcccacacaaggctgccaggcccacctttgcagcagagcatgggaacgagcagtgccgtctgtcatggccgtgggtacggcaggtacattggaggatttgagcaggggaagagtgttctgggaagaagacaaacatcttacccctgaggagtgagcatgtgcagtcggaaagcctgctgagaggaggctggggtgcgaggcttctgaaggccaggtggaggaggtggacttttctgttaggcagcaggtcatctctgcaggcttttaagcagaggagttaatcacccccttctgttcattcctgatttctgttgttagagtagacctgagacctgcctgctaagaggccactaatgccacgctggagtgaggtgatgtcaagaggagctagaaagcagatggttatggcattgaggaaagagcacacatgggctgacagggacagctaagcagcagcttcatgagcaggagggaaagggcgtgttctaggggagcagcagcttccatgtcagactcaggaatgcagcagacccaacatccagcttggagatttcttctctttttcttttttttcaatggaactgtattttcgcaaaatgttacagatcacttatagcaaacagaatggtgatggtcaaggaaactgactctgggctcctttttgaccgcagcagctatgtggaagcagctgcagctgtgataagggccgcccagcatggatatttctgtgtcttcgttcactgggaagtggagggacagagcttccgacccacatcccaccttcttcacgaatcatctttgccaccaaatcgttggctcataggtgtctgttcttgtctttcctgcccatgcctggcttttaggttcctttgctccagctctttctgtcagggctgacctggagggcagtgctcctgtgagttctccacattatatcatggccggtaatctaatccaattcaagctgacattctccaccctatgttctaccaatggaacctggtcagacatctgggctcattcaggaagtgctgctagggcatggctctggaatttggtgggagtattttggaaggttgtgtggtctgtttggttgtttagtgctcggactggattttgattttttttgctttacttatttttactgagacggagtttcgctcttgttgcccaggctggagtgcaatggcgcgatctcggctcgctgcaacgtccacctcccaggttcaagtgattctcctgcctcagcctcccgagtagctgggattacaggcgcctgccaccacacctggctaattttttgtatttttttagtagagacggggtttcaccatgttggctaggttggtcttgaactcctgacctcaggtgatccacccacctcagcctcccaaagttctgggattacacgtgtgaaccactgctctgggcctgtttatttttataataataagaggtttttgaaaaaaattcagatagatgcaacccagttaaaaaaaatcccggtatacaaaatcctgcctttgaataagagattaaaaaaagatggtcattatttgctgcctgcaggggttcactaagggatatgggtaagttcccttagctcggaaaaaggataataattaatacccgcttacatctccaaagtcttgaggtgctcaaacaagtaggagtgtgtgaaatgctttgtacatatcaaaacactctgtgaaatttaaggtattaactaatggataatgacttcttgaacatttaagagtggtttgatttacgtttagtagaaactcatctagtatgaaaatgatacatttattacaaatgattaacaaccctacagctctcaacctctttatgtaaccttccttctgactaaaggacccagatgactttgaggaatagcctgtttgctgggtgcattctcactcagcacttctggaagtatccattctacagttagtatttcatctcattgtcctggccttccgaaagcacccttaacccaaggtgtgagatatcaaagtaatacatattttacttcagagatgacatctcaaggttttacagtagctcaacattttctagtctcctttctctgaacattgtcagaggggagacaggcgttcctgggaagaattaattcctggaatggtgtgtgtgtgtgggtgtggggaatgggaggagatggccggccttcttttctagggttagtgggtggaattgcccgcccaatgattaattccctccttgacagtgtgttcagaagcaggcaccttgatggctctttagcagcaataccctcctcttctttcctagcctccttttgtcataaagcctcatcttttttatttatttttatttatttttttttttttgagacagagtctcactctgttgcccaggctggagtgcagtggtgcgacctctgctcccaggttcaacttctgcctcccaggttcaacctctgcctcccaggttcaagtgattctcttgccttagcctcccgagtagctgggattacaggcacgcaccaccatgcctagctaatttttgtatttttagtagagatggggtttcatcatgtcggccaggctggtcttgaactcctgacctcgtgatccacctgcctcggcctcccaaagtgctgggattacttgcgtgagccactgcacccggccaagcctcatccttctggtgttcacctcttggtcctgttaaggtggcccttggcaagtacctctttagtcttagggttcatgggagggatagaacaaaggcccacgcctccccctagcatcgacatttcccttcgtctgccaatgcctaccatagctttgttttctcccgcactgcttccctggttttctaggctcttaaatcctcaaatttgacttgcatgccctctagtggcaggtctgatgcaccccttgttaccctgtttattgtggtaccataacagctgttctcaccacccagctctgttactaaatattgtctgtaattcacaaatgccaaatgagaggttcagtggtcctgacttgccactcaagtaggagctggaaatgtgggatttgaattggagcttttgattcctggatttatacagcatttcagtgtaacggcaacagtaaaaaagatgtggttatagttgttctagtttcttttttgtcatttaaaaagaatccagattattttactatccactcagctaatctgaaagaatgaaaatgtgaggaatagtggaaaataagaatgatcatctttttttaaaccctttattacaattagaaatttttttgtcacttactgagtattcagtatttcatgcctcagtcctgttaactttgaagaatacaaaaaatacataaagcatgatgtctgcccctaagtttctgttctagttagattctagttatgaggcagttaaatttcttcacctgaggaaaaaaattaagcataacacatgataacttttattggtgtttaatttttctacttctcactaaagacaggttctctgagcatttactttttaatttattcttacagtccttttcagtggagagggaactacaggataacagcagttaccccgacgaaccctggaggataacagaagaacagcgcgagtactatgtcaatcagttccgatcccttcagccagacccaagctctttcatttcaggtaagaatgtgggctccctaggcatcactctcaccagaacatagccaccatcttgagaaatcattcacgcaaaatgagtatggcagccttctgtgatttcagtttgtttttcatctaaagtcgaatttcttatcagatgtaaaccatgcagaagaaaagttgccaatgacgtttggaaaattatatttccatttcaaagggcttaagtgggaatttgggggcaacttggcccagaccctgcaccttatcagctgaggcagttcttgaaatgctagcgtgtcgccccaaggggccacctctcattgcttcctcgttatattagagctcgggcaaggacagaatgtggcctcctaaggagttggtgtcacaagtctttttatgttatatgtgccttcaaacttcaaactcaggctcgttttctttggctcaaatgtttgtcctccagtttttctgagagaaattaaaatgggggaggaaaattggccagtgctttcccacttgtcagttcttctgggttgtcttcagatatatagattcctgttgagttctcatgtaaaattcaagctcagaggaactggtttaatgccagtgtggctacattttaccaggctgaaagactaacagtgaaatagtagagtctagaagaaaaattcataaagctttctttttagactttaaaatttgaagaataacaatatgtccttaataattgtaacctgccatattgaagtgtgggcaaagattagttttatcttgtgaaatgaggcacataattgaaatatacttgtataagtaattgcaaacatcatttactgattggtggtaatggctttattgacggcagaatagtacagatacaacaaattaatgttgacgtcatgattaaggaaaataagcagaaacccatattgcacgatttgaccacttgctaaccttaccccgtgctcaggtgagtttctttacgacatgtgcagatatttagccaaatacaaacaggtacttgttagaaatgtttttgttttcttttaacttttgtatcttgcagaatttcagatatagacacaactagtctggctgatacaacaaacctctgtgtacctatcacatagccccaatgattttctcttacctacagttaacacataaggttgtttcagtcagtcaatgatggcggtaccataacagtatcacggagctgaaaaattccagctccattaatcacctagtgatgctgtagccatcatgatgttgtagcacaaggcagtgctcacataaatgtgatgatgctggtaaaaacaaatctgtgctaccagtcgtataaaagcctagcacatatgattatgtacagtatataatacttaataataaatggctattattagcttattatgtatttattatgctatactttttttctttcttttcttttttgagatggagtcttgctctgtcgcccaggctggagtgcaatggcacgatcttggctcactgcagcctccgcctcccgggttcaaatgattcttctgcctcagcctcccgagtagctgggactacaggtgcatgccccacaccaggctaatttttgtatttttagtagagacggggtttcaccatgttggccaggctgctctcaaacccctgacctcgtgatccacccacctcagcctcccaaagtgctgggattgcaggcatgagccaccgcacctggccttttattatgctatacttttattgttattttagagtatactcttacttatatataaaaaaaagttaactgtaaaacagcctcaggcaggaacttcaggaggtattccagaagaaggcattgttatcctaggaggcggcagctacctgcaggttattgtcctcttctagtcacctccacagtatagaggtggaagacagtgttattgatggtcctgaccttgtgaaggtctaggctgataagtgtttgtgtttcagtttttaaccaaaaagtttatacgtgtttgtgtttcagtatttaaccaaaaagtttaaatggtaaaaaaattaaaaattttaaaaatagaataatagaataaagatataaagaaagaaaatatttttgtacagctgtgcaatttttttaaatttttaaatttttgtgggtacataggtgtatatatttatggggtacatgagatgttttgatacaggcacacaatatgaaataagcacatcatgaagaatggggtatccatttcctcaagcatttatctattaagttgaaaacaatttgactacactcttaagttattttaaaattgtacagtgtgtttttgttttaagccaagtgttattacaatggagtcaagaaggttaaaataaattttaaagtttatgaagtaaaaacttacactctaaggttaatttattattgatgaaaggatttttttttttggtaaatttagtgtagcctgagtgtgcagtatttataaagtctacagtagtgtacagtaatgtcctaggccttcacagtcactcaccactcactctctgacttacctagagcaacttccagtcctgcaagctccattcatggtaagggacctacaaaggtgaaccatttttcatcttttataccatatttttactctgccttttctatgtttcttctttctttcttcctttcttcctttctttctttctttctttctttctttctttctttctttctttctttctttcttttttttttttttttgacagggtcttactctgtgcctaggctggagtgcagtgatgtgatctcggctcactgcagccttgacctcctgggctcaagtgatcctcccacctcagcctccctagtagctgggactgcaggtgcacatcactatgccttgcctggctaatttttttgtagagaggaggtctcactatgttgcccaggctgttttctatatttagttgtgtttagatacacaaatagttactattgtgtcccaactgcctatagtattcagtacaggaacatgccgtacaggtttgtagcctaggagcaataggttctaccatctagcctaggtgtatagtaggctataccatctaggtttgtgtaagtacaccctgtgctgttcgcacaatgaggaaatcacctcatgatgcatttctcagaacgtatccctttttctagaaatggaatctcataatatgtggtcttttgtgtctctttcatttagcataatgttttagttttttttttaattaaaacatttgtgtgggtacataggtgtatatatttatggggtatgtgacatgttttgatgcagacatgcaatacataataatcacatcatggtaaatggggtatccatcccctcaagcatttatcctttgagttacaaacaatccagttacattctttaagttatttaaaatatacaattaagttattgactatagtcaccctattgtgctatcaagtagtaggtcttagtcattctttctaactagttttttgtacccattagcaatccccgcctcgcccctactctctccctgccactacccctcacagcctctggtaaccttccttctactctctgtgtccatgagttcaatcattttgatttttagatcccacaaatgagaacatgcgatgtttgtctttctgtgactggcttatttcacttaacataatgatctccagttccatccatgttgttgcaaatgattggatctcattatttttttttaatggctgaatagtaccccactgtgtatacataccacattttctttattcatctgtcaatggacacataggttgcctccaaatctcagctattgtaaacagtgctgcagcaaacataggagtgcacatatttctttgatacactgatttcctttcttttaggtatatacccagtagtgggattgctgggtcatatggtagctctaattgtagttttctgaggaacttccaaactgttctccatagtggttgtactaattcccaccaacagttagcataatgttttaaaggctcattcatgttgtatgtaccagaatttcattcctttttatggctgaataattccattatatcagtacatcccattttatttatccattcatcagttgataggcatatggtgttcttccacttttggagtattaagaataatgctgatttgaatatttgtgtaccagtttttatgtgaacatatatttttatttcttttgaatacatacctaggagtggaattgctagatcaaactgtactgggagctgaaagcattcaaattcaatctcagtaaggtctaacatttcaagaacagctgggtcttgcagttatgtaacatgtaaagtggaatgattgcctgatttcagttgatacaggtaaatcaacaatgaaggaagaaagattcctggataagtttctcaaaatgccactaggaattcttaaatctcaccaaaagctttcccaagatgtctgtcttatctctgtgtggtgtgatcaatggtattaattttcttctttttggtcagttttctattacttttctatttgaaatttctatttgaaatctgccaaatttgttcaaagttttgaacttcgtcttctaaatttttggaaaaattttgcagattttggtaaaaatgaagcagaaattaatttatgtgatttgcatctttcatgagcattatgttattgcttcttttgccctattgtaatttacatatttttaaaaaagctattcatgtgttgcttttggtcccatgattcataattgctttgaggaataaatatgtttgtggttatacagaagagattgctgaatgaaaaaattgtgattcatttgtatataaatgtaaaagctactctagctgagtaattaatggtttatttaaacaatggcacttgacaggttctgtggccaagaacttcttcaccaaatcaaagctttccattccagaactctcctatatatggtaagtacaattaatgccatatgacattcataccatcatccataactcatcctttagttcctacctttgcattttttaaaggcttatgttttgaatgatgtttttaacagactacaggagtgaatacaactcagatttttgttgctgtgaaaattaaatgttatatgaaaagtacaatgaacaatgtctggcacgtattaagcactatgagtgttaactattattttaaagtaatttcctaattattatccccatctcaatcccttttcagtctaggcagttgtgggcacatgagacttaccatcctgtagatttcattttcagacttttctgctaggtgtgatacaagtaaccagaggagcttgacaaactattttttatattttataaggctgagtgaacagaaggttgaggaatattttggagttaggttagatttgactattctagctgcctctgagctttgcaaatttggctggtgtttatcagttgggccctaattcagacttgcagctgtggtatccactgcacctttatgcactctggttccaaaagggctatgctgggatggtccagatggctctatttgcattcatgaaaatgcttggtgctgctgtaaactctcggctgtgtgtgggctagttcttccccaaaactgggcaggagatcgcactgctataaatatataattaaaaacattataatgtttatataaagctttttgcatgaggatttacagaattatgataggatttaaaattgcttgtcatgttttgtgcatcttattggaaaactactccaataatactcatgcatgtcaatgtatctgggattctgagctggatttaggttcttcaacaatatatactctggcataatttttttgtttttacaagccttatattagttttgtttttgttttgttttttgtttgtttgtttgtttttttggagatgagggctcactctgtcacccaggctggagtgcagtgacatgattatagctcattgcagcctctgactcctaagctcaagcgatcctcctacctcagcctcccagctagcttttcatttttttctagagacagggtcttgctatgttgaccagtctggtcttgaactccttgcctcaggcaatcctcctgccttggtttctgaaaactctgggattacaggcatgagccaccatgcccggcccttatattagattttctggctagggaagaataaagaaattatcattttgaaaagaataccatttgttttggcagaattcccagtctaaacattgttggcatgagacctcctatctttttgttgagacacgcctatgaaagctgaatggtattctttcgatctggcgtatgaagcagtttcctgacccctcactctggggaacagctatttcagggccccagtgcattcgaaattggaggaggaggatgtaaatggtctaaaggaaagttatggagcttaccttagaaatatattttctttcaaatagtaatacctttctagaataattttgtatttgtcttatctctatgcttgtcctaacacaagtacacttgtccctgtctacctaagagatggttaagcttatggggtcttagatataatactttggcaaataagtttcttttgtgctgagtaaataggtctgtgccttttagtgggaaataatgactgaagttaagcctgtttgagactccccctttcttcctttttgtcttatctggttccagtcagctttagttactagttttatcctaaaacataattcattccattttttattgagcttacttgtgttttcccaggagggagttctcaagcaaagaacagtttggtacaaaaatttacgtgacttgaaaagttcacggttttcctttaaagctgaaaaacaaagagcttatttctgtgctccaggtaaactgcataatggctaggacaactataaaatggctggggccacccttcctctgactgttttgaacaccatgtccagggcttttcaccccatgcagcctgcatttactgaatgactgtggacttctgggtatcatttttatttctgtgccatagtttcttgtcctatgtcctcagtgttgtaagacacaccaactagggaacctgaagaatttaaatttttatttataaaatgctactgatgctgatcccatcaatcggcatttttcttcctcggagtggcccccagagatttcaaatggatttggctaggagggtttgggtatctggtagggccatcaccacagagtctgggagttttattggcacgtttgggccaagtaacttgttctgtaagccccatggtaggtactcatgacatttgtttcatttagggagcttagtgatgctgactgtgatggagccctgaccctgcctgagttctgtgctgcgtttcatctcattgtggctcggaagaacggctacccattgcctgagggcctccctccaactctgcagccagaatacctgcaggcaggtaaggcctcaccatcaactgtaaaccttaagtacttttcctccaggctgtgtaaaaaacttttgtttcctgactttttaatgattgccattctaactggtgtgagatgatatctcatagtggttttgatttgcatttctctgatggccagtgatgatgagcatttcttcatgtgttttttggctgcataaatgtcttcttttgagaagtgtctgttcatgtccttcgcccactttttgatggggttgtttgtttttttcttgtaaatttgtttgagttcattgtagattctggatattagccctttgtcagatgagtaggttgcgaaaattttctcccatgttgtaggttgcctgttcactctgatggtagtttcttttgctgtgcagaagctctttagtttaattagatcccatttgtcaattttggcttttgttgccattgcttttggtgttttggacatgaagtccttgcccacgcctatgtcctgaatggtaatgcctaggttttcttctagggtttttatggttttaggtctaacgtttaaatctttaatccatcttgaattgatttttgtataaggtgtaaggaagggatccagtttcagctttctacatatggctagccagttttcccagcaccatttattaaatagggaatcctttccccattgcttgtttttctcaggtttgtcaaactatgcagccataaaaaatgatgagttcatgtcctttgtagggacatggatgaaattggaaaccatcattctcagtaaactatcgcaagaacaaaaaaccaaacaccgcatattctcactcataggtgggaattgaacaatgagatcacttggacacaggaaggggaatatcacactctggggactgtggtggggtcgggggaggggggagggatagcattgggagatatacctaatgctagatgacacgttagtgggtgcagcgcaccagcatggcacatgtatacatatgtaactaacctgcacaatgtgcacatgtaccctaaaacttagagtataataaaaaaataaaaaataaaaaaacaaacaaacaaaaaaaaaaaacaaaaaaacttttgtttcttaaaatgatgtccagatactttggggagtccttggtatttacagttattgttctttaactgctattagactttcacatctcataatgtgaggaatagggctgatctgggtaagtgtgtattacctgtttttctcattctataccctctggatggatttgaaccaaagtcacttaccctttcatgacagttgtgaaataggcaagtactgaacctcccagctggtataaaatgaagaggaagatcctgtagagccaagtgttaacttggcatttttaggcacacccgagtgtctccgggtggccctgggcaatggagtggaatggaactcttatacctaatttaaaagtcaaaaaattagccgggcgcagtggctcatgcctgtaatcccagcactttgggaggccgaggcgggcggatcatgaggtcaggagatcgagaccatcctggctaacacggtgaaaccccatctctactaaaaaatacaaagaaaaaaattagccgggtgtggtggcgggtgcctgtagtcccagctactttggaggctgaggcaggagaatggcatgaacccgggaggcggagcttgcagtgagccgagatcgcgccactgcactccagcctgggagaaagagtgagactctgtctaaaaaaaaaaagtcaaaaaattacatgcagtgaaatgtgcaaagtgttgtcaccttaaatgtatgcttgatgaatttttgtatatgtatacacccatgtaactacaatcagatgaagatatagaatattctagcatatcagaaggttagaatagaactgttatatttctccttaataaaacagtctcgctcaaattattgttttggaccctttagatgggaaagagtcatggtgagtataacatatgtattaattcctttgggagagtagaaaaattaatagtgtgtcttgcccttttcaaaggcaaatgggcactggtctgatttccattattcatggaagtatagtgctcattgagaggccccagaaacagctggtgctttcaacaacctttctcactttttagggaagggctgttaaagaaatgagagcttagtcatgggtgattattagcaagagagagcagtgtctaaagaaactttaattacttattagtagagtatgaattttgtgattagatctgcaaaaggccttagattatcttgtctagccccttcctcatgatgacaccagattcaaagtggcaaatgtcttatctaagtttgtctcggggcctctgactctcttaaataaaaagtctgtcattttctgtgttaaatagtgagaggagaggaactcaaccaaagggcagaggccaagtttgtggctgctgctaagtgacaggtaaacatgttgggggaagagtgacccattctgggatcttcttcaaatgtcctcataaaatatgtgaaggggagagttcagagagcaaaacctactaatttctggacttggattttgctaacaatacctgctttctgcctattgcaggctgtaactctagcctgctgcccttccttagatgcttggaagactctcatgggtcccaggaattagcttgcaattgaggagcatgggaaactcctcttttctctttggtgtctttctgtctccatttcattctctccctcgtcttgtcttgtcttgtctttttcttttcttttcttttctttctgtttcttctgaatcagggcaaagaagcactggcattctgggggctatcttgacgcctacatggctctcattgccaaggcagtgcggggtcatagaggagccccttttcttgggattggagacacatggggcttttgtctctctctaaagggaattaatagctggcaaagggccaagttctgttctagggttatatttaataccttcgccgtgtcctctttcaagccctggagagagtcctgggtaacctcatctcccatacccacactgagttttctgtttgggggtcatgactagtactgttttattgttttgatgccatatggccatggaacctgtgggacatgccatgactccttatttgataagtcacttttgtaggtgtccaagtgtttcacagactatttcaaaagtcactgacataacggctgggtgtggtggctcacacctgtaatctcagcactttgggagtccaaggcaggtggatcactggaggtcaggagtttgagaccagcctggccaacatggtgaaaccccatgcactaaaaatacaaaaattaaacagatgtggtggcgcacacctgtagtcctagctactagggaggccaaggcaggagaatcacttgaacctgggaggcagaggttgcagtgagccaagattgtgccactgcactccagcctgggtgacagagctagactccttctcaaaaaaaaaaaaaaaaaaagtcactgacataatttttagacatctgaaagccctgagctaaaagtatgttaacaggaaagaagtaatctcttgattcctttcctactgccaatggcttcttttgacctgcttattcagtagaggggaatctataaaaaagagtgccaatgagccccatgtttcttcctggacttttatggagactgtcagcatgcatttatacaggaacaagggaagaatccatcatatacacttcaattaaacaaaaattgcacatcatttctagggcttgtgggattaatcttaaataataattatatagttctaacagaaaacatgaaagaacccataaaactctatcaaactcagtgacggtatattttaaaatgctttatcacctatgtttatcattgtatgaagcttaagaaaatggccagaaccacctaggtctcctctgtgctttttttgcttttctttgcaaaatatgagtgatcctattcatttttttgttcattttaatggcatctcatttagtgtttttcttttttctttctttctttctttttttttttttttgagacggagtcttgctctgttgcccaggctggagtgcagtggtgcaatctcggctcactgcaagctccacctcctgggttcatgccattctcctgcctcagcttccaaagtagctgggactacaggcacatgccaccatgcccggctaattttttgtatttttagtagagatggggcttcaccatgttagccaagatggtcttgatctcctgacctcatgatccacccgcctcggcctccgaaagtgctggacaacacgcccggcctagtgtttttttttttttttttaaagcttaactcttacctttttccaacttttttctaattgatctatattcagtctttaaaaaatctaatccagtttttgataagattggtgaagagtataaatttggttgatatcttcatgcattcataactagacaagcttgttttctaaaataataattttttttttgagatggagtctcgctctgtcacccagacttgagtgcagtggcatgatcttggctcactgcaatctctgcctcccgggttcaagcaattctcctgcctcagcctctcgagtagctggaactacaggtgcctgctaccatgcctgacagatttttgtattttagtagagacggggtttcaccatgttgaccaggctggtcctgaatttctggcctcaagtgatccacccacctcggcctcccaaagtgctgggattacaggcatgaaccacccaccacacctggcctgttttctaaaataatggaacaggaattgtatctgatgccattttacttgcaattatggaaatagtcccttttccctaatagtaaaacttcaaggacagagttgtattagttggtggcttacccgctagccttttgatagtttcatcaaaagtctccttttgatagtttcatcaagagtctccttttgatagtttcatcaagagtctccttttgatagtttcatcaaaagtctccttttgatagtttcagctgggtggggtggctcacgcctgtaatcccagcactctgggaagctgaggcaggaggatcaattgaggtcaggattttgagaccagcctgggcagcatggtgaaaccctgtctccaccaaaaaatacaaaaattagccaggtgcggtggcgtgcacctgtggtccccagctactcgggtggctgaggcaggagaattgcttgaacctgggaggcagaggttgcagtgagccgagattgcgtcactgcactccagcctgggtgacagagtgagattccatttcaaaaataaaataaaataaaaataaaaaaataaaaaaagtcaccttttgataggtgattgggtgggttctggtagaaatttttgccatagagtttgttaaaaaatacctatggagtacttactgcgtgagaggtaccacattgttcactgtggtcagaatgctgtatgacagagctcctactcccatgaacttgtgggcagttgatacgtgccatgaaggggaagtacaggtgcagcaagagggtgcatgatcttagggaagatttccttaaacgtttgggctgagatgtgaaggctgagctaaggactacataggtgaagaagagagaagcttaggttctgggaagggggaacagcaggtatgctggggaggctctgagagggggcttggagcataggaggagtgggaatttcaggccacagtggctggcgtgcacagaaccggggtagagaggctgggttgaagctgaggaagaaggtggggaacatatgacgggcaataatgtcaccttattttaggcagataagtgacacaatcagatttgctatgtgaaatgatcatgcaggttactgtccagagaacaggttttgaggggcacgggtagaaaccagaagactaagttgtggtagctggccagtcaggagcagcggggtgcttgcaatggggaggtgacagtgatatggagagatgtggacaccttggagagagatttagcaggtaattgacaaaattatagttttggaaagtgttagctttcttcacaggaagatccgctcatgataaagcatcagtcatataataccagtcagagccttgattgatagactagaaagagaaatcggtgaaattcagaccagagtaagcaaatgaacaaattaaggtgcttgtactcaactccatgtggtgctgatactcagaccagtacttccttacttacttactgtatgtatgtatgcatgtatgtatttatttaaattagatagacacgtaggtaggtaggtaggtagatacaaagacagatgaaacagggtctcactatgttgcccaggctggtctcaaactcctgggctcgagcaatcctcctgccttggcctcccaaagtgctgtcattacaggtgtgagccaccatgcctggccaatggccagtactttactgcagaaggatattggcatttcagtccctgatgggagtgggagggtggggaaggattaaaaacaatgccaatccacttttcacatttgattcaaatttttttaaaccttgcattacaattttatttcctaatagcttgttgtgacaaatttgatttgtagcttctgtttattatctgccacagtctgcttttcctctttggaatattgacaaattttctagctgttgagatatttctttcctaattactttgtgacaaagtagtgaagcagaatccgcttctaagacatagcctggtgtgaagtaattagcttaccaagtagcctgatctttcctcgtgtgaattcactcaactaccgaaataacagccagtgtcactattgcatattgaaagaaacccttaatgtgattctttttttctttgttgtaaatcagcaagaatttatgctcttatttttatcattcctgccaaccaaggagataaatatttcgtaaaatcatgttgggtgcacatcattataagatcttgcctatttctaacaatagttaaatgatgtatttccttagttaatgtccctatacattagaaactacactagtaacatagttaagacttacatattgtgatagtgatggttattgtggaaaattactatgctataacatgaagtgttcagagcacatacccttcagccagactgctgagagttcaagtccctgctcttccatttatcagctgtatgaccttgagtaagttgccctgttctcagtttcatcacatgtgaaatggggataatagaagtactgggttgtccatataaagaactgaaagtactacctcagcatgatgaatgccatatgtggtctatcagagctagctgattttgttgttatatttaacaagcacagaaaagctgatgggaaacactgattactatggctataggaaatattctgatatattctttttgtttcttcttagcttttcctaagcccaaatgggactgtcaattatttgattcttattctgagtcactgccggcaaatcaacaacctcgtgacttgaatcggatggaggtaaaagatcttcatatgctaataaataaggatgtgtatggagctaaatccattggcctatgttctttacaaattctggaaaatgaactttttttttgtttgaaaatgagcttttataacatttccttttcatacttggtaattattaatactttgatgctcagcctttcagatctagacaccagatgtatctataatttttttcccttttctccctaaaactggatgtggtaaagtaagtaacataatctctagaccttctagatgtgaaatgtagatatagccaaactaagacagaaaattctagccaagttatttactttaaccaagctttaattccctagtaaacaattttgattctatttttatcagttgggcattaataagctatactgaatcagaactgttttgagaagaggtttgagaactttatatgagggccccaaatcacattcggaactccctcagggtttttagcttttgaaccaaatgaggactgatttggatgatccccagaaggaacttggagaattcccccagtgttgggccatggatggaagggcttagccaagtgcttaggaagccttagctatggatcaataaataggagttgttatagttattgttgtcatcaccattgtcattatcatcatcatcaccattatgattactgtgatgacaatttaggatacctgcttttcccttccttaaaagatctggaaatgtttaataaatggagctttattcacagactccataatagtcagagactattagagtcctctgaccctagttgaaaccactgcaagatgatagaagtcaaagtcagggaacagggacatttctttaatttcttgtgactgtgcatgatgatttattctctcacatgaggccctcatgcctgtagcatgtgttatggatggcaccgtctgctcccctgtgagccagtcaagcctgcctttccagtgcccctctgactaacatctctctgccattttgcttctctttctttgagttgtgtcctccatggtactttcctcagatttctactcatgggaaaaagacataaagaaaagtcacttcaggaggaatgacagatgtgcatttgaagaattttggttaaaattttttttttctgcagaatgcttatgacaaagagagagataaaatagtttgccacttttcatggccctcagtttactttggggcttctagcagtgtttaaagagctttgtttatcaagccaggatggatacatctatggctctctgactatgtgtgtgtgtgtgtgtgatgggccccctgcttgcataaaatgatgaagttattagttggtcttctttaaaacggccataaaatctgttacacatgcacacgtctgttttactgttacacacacacacacacacacacacacacagtctctctcgcttgctctttctctctctctaatgtcctggatggcgttacatatattcacctttgtggattttatatgcagctagttttatatacttttgcatactttaagtggcctccttggggaggggagattaaaaactacctagtcttttttttttttttgccctatccaaagaagaaagcaaaacaacaacaaaaaatcccctcttttccaaccaaattgttatttttgaggatgctatggttttagacaatgaatgcagtaaacagaattcaaggacaaagtaatagggtttattgatggtttgttcatttaagaagtacgggtcagattgcaataatgattcaatatttcatgttcttctaaactattactgattgttctttctactagtcttttaatctatcatgaatgcatggagtttaattagattttggaaccagccctgtgatcgatgactccagtataggtggttgtgttctgaacaaagctgcagctgatttaggtctcacgtcatgagaaattggcttagtgatacatctttttctaaagacagcagagctgttagccatgtacttatttccattaagaattacagatgataatttcaagtatatttctttttatgagtgtctcttacattactggatttctttctttttctaaacagctttattgatagagactttacataccatacccatttaaagtatacaattcagtaatttttattatattaacagttgttccaccatctctacagtttaattttagaagaacatcatcagcccaaagagaaacccaatactcatgagcagtcacttcctattccactgtctctgccagcctctgataatcactagtctattttctgtctctagatttgcctattctggacatttcatataaatggaagcatatagtatgtagtgttttgtgaccgtattctttcacttagtataatgttttcaaggttcactcagatcataacatgtatcagtgcttcattcctttttaatgctgaataatattgcattgtatggatatgctacattttgtttgtccattcatcagttgatggacatttgcattgcttccacttttggctattgtaaataatgctgctatgaacatagatgtacaagtttttgtgtgggtgtgtgttttcggttctctcgagtgtatacctaggagtggagttgttggattgtatcataacttaactttctgaggaaccaccaaactgctttccaaagcaactatactattttacattcttccactagcagtgtatgagggttccaattttcccacatccttgttaacacttattgtctgcctttttgattttagacaccctagtggaatgaagtggtatctcattgtggttttgatttgagtttcctaatgattaatgacgttgagcatctttttgtgtgcttattagccatttgtatatcttctttcgccaagtgtctcgtcctttgtccattttaaaattgcattacttgtctattgaattgtaagtgttcttgtgcttttggcatcatatctaagaaaccattgcctaatattaaatcacgaagatgtacttccatgttttcttctaagagttttgtttgtttgtttttttgttttgttttgttttttgagacggaatctcgctctgtcaccaggccagagtgcagtggcgtgatctcagctcattgcaacctctgcctcccgggttcaagcaattctcctgcctcagcctcctgagtagctgggactacaggtgcgtgccaccaagcccagataatttttctatttttagtggagacggggtttcaccatgttggccaggatggtcttgatctcttgacattgtgatccacccacctcggcctcccatagtgctgggattacaggcgtgaaccactgagcctggcctcttctgagagttttatagttttagacctttacatttaggtgtgtgattttgagttaatttttgtgtatgttctgaggaagaggtccaactttatttttttgtatgtggatttctagtcgtcccagcaccatttattgaaaagatgtttttttccccattgaattgtcttgcacccttgttggaaatcaactgaccatagatgtaagggtttatttctgggttttcagttctattctattgatctatatgtttatgattatgccagtaccacagtgtcttgataattttagatttgtagtaagttttgaaatcaagaagtgtgaatcctttaacttttttcttctttttcaagaatattttgctattctgacttccttgcatttccatatgaaatttaggacaagcttgccaaattctgacaaagattgcattgaatttgtagatcagtttggagagtatggccaccttaccaatattaagtcttctaactcatgaacatgagatgtctttccatttatttagatatttaatttctttcaacaattttttgagatttctttttatctacattgcctacttctaaattatgttattctccaaaggggcctgatttataatgcaggtgggaaaagacaatgaaagaaatgcactgttatgatacattgtctgttctattggagatagtagactttgaatagaaaattatatctggatacttcgttttaatgagtaaatcccagcactatgtgaggccgaggtgggcagatcacgaggtcaggagattgagaccatcctggctaacacggtgaaaccctgtctttgttaaaaatacaaaaaattagccgggcgtggtggcatatgcctgtagtcccagctactcaggaggctgaggcaggagaatcacttgaacctgggaggtggaggttgcagtgagccaagattgtgccactgcactccagcctgggcaacagagcaggactccatctcaaaaaaaagaattacctgagtgaagactgttaaatcttagaccagttttctactgagtaatacttcagtctctttcttcagaacagtttaaaaacaaaagtattgcttatctctctggggttgtttaggttctgagaggtaaaccaattaactttttggaacaccagatggctccaggcatttactctccttccttcaagataaatgttacaatttatctttatttaatttgtgactatgttttaaatataaacaatatcaaaagacatatgttgacaagtcttcctcccatctaccaactcacctttcaattcttacatatctttccagagtttgtgtatataaataaagcaaatgtgaatatatattattcttgaacttaatcttataggcattagagtgcatattcttttccagctttgaggtataattgacaaaaaatatatatttatgatgttttcatctatgtatatattgtgaaatgattactgcaatcaagctagttaacatacctgtcacctctcacatagttacctttttttggtgtggtgagaacatttaacatcaactcccttagcagttttcaagtataccatacattgttattaactatagttagaatgtgtgttaaattgagaatttacaagaagtaaatttacagtaagtagattttaaacggtttaaaactaattcatacttgatagatttgggtattcatattagtgtgaggacttcccccctgtttgcattaggagaaaattttaatctgctcatcagtaaaattcttttatcccacaacaagaaggctggtttaatcaggtttagacaccatctgcatgacagatcttggcaaacacccacattgtggggccacttgtcagaacttctttgtgtttgtgaaaaaatacataaagaacaggtttgttcttggccaaatggaccagagttgctatgcaattctgtggctgaatcccagtctgaattcagatttaatacatgtgccttaatctgaatcatttttttcctctgtgtatgtaaaatttcaatacaaattaacatatacctcactaggaacctaaaaaaaataaggtagtattaaatgcagggtttactgcagatggaaatggtggcaagaaataatagcttttaagacattttcggctgggcgcggtggctcacgcctataatcttagcactttgggaggctgaggcgggtggatcacgaggtcaggagatggagaccatcctggctaacacagtgaaagcccttctctactaaaaaatacaaaaaattagccaggcgtggtggcgggtgcctgtagtcccagctactcgggaggctgaggcaggagaatggtgtgaacccgggaggtggagcttgcagtgagccgagatcgcgccactgcactccagcctgggcgacagtgcgagactctgtctcaaaaaaaaaaaattttttttcatcatatgtgcgcatcacttaatttctgttccaaccagtttaattcatttacttttctttttcaaagaagacatctgttaaagacatggctgaccttcctgtccctaaccaggatgtaactagtgatgacaaacaaggtaggagaagaatgagttttcttctttaaccagcgttctacctgttaccttatctactcctcttggaatggtggcttctagagcatatgagggtggttctcagcatgtaaacacatttggatagactaagtagttcaaatcattgtcataaaacaatagttcacaaagtggtagcaagagcttgagtgtccagagtcttccaactcattggccccttagtcattgctgaccctcagcctactcttaacaccttacactggaatctgatcgtagcaattaggaaatgacaggaagctgaacgaattgagaacatgttgtgtttgcggatgtgatcccagacatcagtgtaaatgcacatttgcatacagctctaatccatgaggaagttctcttctggacacagcttctgtccttagtgtttatctgtttcttggctttgtgagtgtgggagtgtgacatggagcccagctacaattttcctatcttactgggcagctgagaagcagtgcagcacagcattccgtgttagagctactcccagggaagagttggcttgggaatatctagaagtgtgggagggaccctctcccccacctcctatactttgtatagtgctttataatctaccaggtccttgctcatatactgtcttattcagtcctcacaaaactgaatggaggctggtaagttttatcacctgaaatttagagatgagtaaactgaaattcagacactatgaatcatttgcctagttattaagaaaaagatttgggacaagaaccaagattttttctaagcctcaagccagtattctgcctgttatttgatattgatttactacccatgaatgagaggcttatttgaagggactaaaaatcagtgaagctatttcaggttttattgttaaggcctgccattgattaggcattgtatgggggcttaacatgaaaaataagttttccattaagtgacagtaattgcatgttctctatttaaatacttgcttgggagagacaggtagaactggacattgtctgcagtagcgtgtactctgaccattctcctaactgcacagtggaataactgggcaaactgtaaaaatattgaagcctggatttcactcccagggattctcatgtcatcagtctgggtgtcaggaatgaaagagggagaaactcccaatacttcctggtaatacttctcctatctgcttgaggtgctgtctctggaaagttgaaaatacatctttgctctttgtagaaggagaacctatttccatactccaggaggtctttattgttttagtaaatgctatagcaacttttagaggtttgtgagacctgtttttgtaagtgatgactagcgattctttgtttgaatccaatttgcctcagaaataacattttatagttttaattttttttcctcttttctctttctttttgcttaaaaaacaaaacacaactagctttgaaaagtactatcaatgaagccttaccaaaggacgtgtctgaggatccaggtaggagaaaaccatttttgtatactttatatataattattttaaaataaaaaaacagcaagtcagtgagtagaagattgatacctctgtgatagtgtgtctgtttctctctatttatttgtcttgtattttattacaaggaaaccttttggctttttaccctttctctcttttcaggtatgagaacggggtgatatcttttcaagtttttaagtttcactgaaaggatcacgaaggatcactccgtgtgaatatagggtcttgttactaagtgcaaaattgagaaggcttgaggttgagatgatttcaacaagccattttgggttttgtgtagagtaaggaacttatagggtagatcaattggaggcccagagttggtattttccatttccaaagcagaaatctcaaatatttttattatgcttcaccaccaggaaggcaactatatgtgcttatatatggagtggattccaaggagaaaaataaaagttgtccagttttttggagagtcagacctgtgtctgtggagtcatggagaatggctgcccctgtgtccgcagctctctgttgatggagccatcattgaaccaagttgaatctagttaaaaacaaagtggctacagaagacattactatttggagctctagttataaggacatgaaaaaagttgttgctttctcttttgctgttttatttcttgtatatttttaataagtcaatcatgtttgttgtgataagctagctatcatcctaggcttatttgttgaacattggaacagaggaatcaatataatgttgaggcttatgctgtggtacaatattttccaaatgtcaagttcattcagagtttcaaagagagatgggtggagggagaggaaggagttgggggagtgggagaaaaatatggtagggggaaggagagagagagagaacatgagaatgagaataaatatgaatgaatgtggatgatgaatttcaattatggaagcctgagaaggtgtatttttaggcagctccccagttggttctggtacatagcctattttgggaaccaccagctctggaaggtgatgctacaaaatagaaaattaaggttatagatcaaccatgactccaaaagtgatgggaattcccaagcttaattttgactcttgaaacagatttgaattcattccttattgggtgaaatgctctgttaatgtaggccaacgcctggggtcagttctttctagctcttatttctggagctaaagtggatgcattccagtttttgtaaacttcatgttgtagtattagtaaaagctgtttaaatttggagtgttaaattggtgcttctccaacagcctttgaggatcataacttttcctacttttttttttttttttaagggattttagcacaagatcaagtgtcctctggggcatgagctttagatctcatttttaacattccttcattgactaggacatggcatcaccaaataaaacttgtcaggtgtgccacagcatgagaagtatgtcggaattgatttctcgttgtgcctggcagcatgctatgtgttttctgatttgttcttcccactactgcccctctctgggtatgagggagttcctcatcttaaacatagttaatccctccttttctgggaaatgtttggattcccagtgggagacacaagcgtttcaaggtggtgatttagaattctggatggctgtccttgccatgtggacctcagttcagttgctgctttttggagggttaatctctaggcctgctcctctttccattcccatttcctggaaagatgacatgccttgagtgttctaggaaggtggcagtccttttccctctttccagctacacgagaagctatgatccacttgttgtaattgctgagagtgtctatgttagtggagccttaagagattttttaaaccaatatcccattccaacctaattcagcagagcaccatgcacaatggtggtctttttcttgatgtttctggcccatgttgaggtgttttcagctggttcaccctcacagtgctgtctttagactgttgttggtgattctagcagctgctccattgccaactatcaccccatgtttttattggagtagagcagttctgtccttccattacctgctcctacctgcacctcctttgctgtcctagaagaaactaaatttagaaaccagatttccaggcttaaaaaattaggagcctttatttatgcactctacaatagtaatattttgcaattctaaagtacgttcagtttttaaattactttcaccttatctgtccctgtgagaaagaaactgcatttttattgcctttgttttctaggtgaggagactgaggttcagggaagtaacagctagttagtgtcatggccaggaggagggccttagtctcaggactcctggcctggtctctagtcctgtctctccactactcatccacaccctcaccccatctgtctgtctgtctatctcttaccagcagggctcacccctccttccacacccatccctaccagcaaaaagacaaagataatggcacttgacaaaggaattaacagtcaccatggtctgatttggggaacagtattttatcatggcggggacctctcctacccatgtatttcttgaaagcagtggggcctgagggagaagagggccacggagccagctgcaggcagcctgcgtagagggcttccccagctctgtggtgagtctggtccactctgtccacccagccccaaggcagcctcctgagctgggagagaggcttcctgaggtcgctttctttgctgcctggggtttgtaggagggagggaggtctttttctgtctatatccaggtgtgggtgcacgataatgggcaaaaggggactcaaactccttgggctttccaggctttcctgcactctggcagcgtttcagctgtttgaagttggaagatctctgtgttctcactacaacaagccaaaatgcttgggttgggagaagtgtatctcttgtgcagctgaccagtagtttgctttgtgccttgttagcatttatgaggattttcacctcccctctctgtcctgttatctaacccaaggattttaatgatcatcataaattcaggctgcttcataccaaggagggtttttatctttggagcaatgtaaaagaggatgagataatgcagtgagacattttctttttggaagaattcatgcagacaaagaaattacattcttcttgttctgtgttactagcaccttttctatgattttttatgacattttatgatgaaaaatttgcaatgtttgtaacacctgagcatagctactggttcctaaagttgtcttccatagaggattgaaagcataaaaagaggatcagtgtttttgtaaatgtttctaattactcctcacaacttgtgatggggaagaaggctgtatgggcgttggtagtgagcaagttagtttatgatttaaatttgatgaggaaaagtcatatggctgggaaaagattcagcgatattgttcataattctctgtatgatttggtcacagacatgtgggacacaaggatattttcttacaggagaagctgtatagctcatttccacttacttgtgagagctttgtttttttgtggccatgctgctctggtagtgtatttttttttttttaaaacgtgtagttagatagacttcttcctatccttcagggtagactagttcaaaatctattactagactatcatgatagaacaagaaaccctgaagtgtgaatccatcattatataaaaagacaaccccctttcaagggggttgtctttttatactggaatgtcttcattaattaacttggatttgagaatggcctctcaaatagtgcttgaccaaaggaaaaatatgctggtttttctttccttttaatcgtttctttagattttgaaataaaacaaggaaatcatgaaaatgtgggagccgtccagttctccacatgggcacttttacctcacatttacctgttgatgtgttctgtactagcccaggtgctgcatataaacttgtttaactgcagaaatgaaacccaagcaatatctttgtttcagcaactcccaaggattccaacagtctcaaagcaagaccaagatccaggtagtgttcgtttaatttctgctttaatgccctttgtgccgtgcccctgcctagaaataagaaccacaaaccaaaacccaacccatgatttcctcttcctttagatgtaaagcttaggatatgagccatttcgctcgtgcatggcctgatgggaacatgcagtaatgctgggagccttggtttctgtggtcattagtgctagaaggtgaccatgaatgccctacggcccctcaacgtgaagtggattgtgtgagacaacccagttgttgcaagatgataacttatagggggaagtagctttggaaagaggaaaatatgggtaaggtaacagacacgaaaatttgctatcatgacaaggtgaacaccaaaaagtaaaaagtctgggtaataaaatctacagtagggaaagaaaatgcttctgataacttcagtgaagcttgcagtttcaggtaagcgatgtttatggtctgtttgagcctatcttagtgcccctgtaagcttcacattttttaagaggctagtacaagagagaaagccagtaaggcagagctgtggttgatgtgagactcagaagagaggtgcagaggggaaatacagagacactaatagaattaatccattaaggaagggaaatggtattggtactgtatttcactggtagaactgcagtgtaagataggataacgaggataccatgtgtgtgttttctgttttgctttggctgttagtgacatttttccctcctttgcctactagacacaatcctgaaaaagtaaatttaagtctgatcatattttatatgcttgaaatactgatatttaaggaacctcatctctttgtaagtcaaagagttatcctttagtttatatgtgcattttccaaattggggttttgtttccttgtttatgtaagatacagatatctatatttttatatttatgtgtatttaaaaacaatagagtaattcatttaggtaggaagaaaaggtgtaggcattctttctgtggtcaacacatttactcatcctttgtaaaaggatgaatggatcttttacaaactagtctgtactagttgtgggatatgctttcatagtaggaattgcctttgaattgcagaaatctgttatgtgtactatgttaaccataaatcgaacctcaaagttttagcttctgctgacttcctctctccctgaaagccagtgaaattataaaatctcatagccacacgttctgttattaatgtgtctggctaaattttacatattatcctttcagagattgcgcttttggtctaatttggaggattttattttcattacttctcactgggaagaagagaattgaattgtttttatcctcctttttgaaataataaagttttgtagaaatataagggaaagagggaaaatcaccattttaacaccactgcattcatcattttgttaactccctgcacatttatgttttaattggttgcagcagtcatggttatacaatctcacttattttatattcagtaactttccatatgaagatataaacatacaggttatatatgaaaataaaatgaaaatgaggaatgtgcgctgtgggattgtgtgcttaacagtgtgcacgcatacacattatttacacacacattatttcttttttgagtgaaagatgtcactaaagctatatgtggcatagaaagctcttttcatttctagctagggtctctaattgtcttttttaagtgaagtgttcccatttaagaaccttgtccttccgtatcagttccctttgattcttgttgaaagagccagagcattcttccctgctagtttctgcctgttgctgccttgcctgtcttgccagttatgttacagggaccaccccagaacacgtcacatgccattatggtggctttattaaagttacaaccttgtaagacagacagaaccctcaactaccacaaagaatccttgagaaatttattcaggaaaataaaaactcacaatgtcaaaaacagctctgtcaagaactgaaggggtttaatagtaactgatatattctaacttcataaatgccactctaatagctaagtacgaagaaggttttcagaggttaatttgtctctctaggatgtacctctgactcagaggtcgttttctgctttgacatgaagctagttgagaagctaaataaaacagatgtatacatctacatcttagggccttttcgtgatcatcgtattgggaacccgtccttaaacctattcctaagcagtgtatggagttgaattttatttggaaagtaagtaggtctccaataaatattctagttgctatcaccaaagtattcccccgccaactcataggcagtatgagaacattttaaaaatgggatatagaaacagagattggagtttgaatcgaactgtgtaactttctatctgaccttttgcaagttatttagttcctttttaaaaagatgatattaccagagttacaatctcagaagttgcctagttaattatgccttgctatagattgaggaagaaggttgaaaatgagacttttgctttctcagggaaagacaagctagacccctcaatctgattgatgtgtgttttcctttcccagcttcgtttgtggcatattcccctgaacattgaattcttaccctcagcttatctgtcccaattccacatgagcctgtcatcacatttgcaagtgaacaggagaaaagttctctgatcagtttataccatgaaataccatgaagcccttctgttagaacatggaaatgcctaagctgaggggctccatattattcttattaacaattccaatagaaatggatttgaatttacacaaagttttttttggggggttgattcagatctaaggtataataagaacaaagaggttgaaaagatcccaattcatagttggatttggacaattattgtacatagtggcattcaatgggtaatagaatttatggctgctttggtagctcatcggttctttgtagtcactttgacttcgtgggtattttccatttcaccccaacttcagagagtaaagctttgctatttcgcttctgaccttcccttattttgctacagatcttactctagcacctccatagaagaggccatgaaaaggggcgaggaccctcccaccccgccacctcggccacagaaaacccattccagagcctcctccttggatctgaataaagtcttccagcccagtgtgccaggtgaagtgccccttgccccctgagcccttccatttcctgttggagccagcggatgtgtgtctgccacagtggcctctgtgagtccggagaaagagcagacctggcagtttcgcattccgtgaaggtcttcacgtggctatggtattcttgggagagaaagcaattctagacacatatgtagcacatgtgtctggagccttgcccacacttgttatggatcaagaattaggaaattctctaccaagaggataaaaatgcttcactcccatgcagcctgctgagtgtgtggctggggtcttactctctgcatcattggtaatttgtgaacaagatagatcgctgtctgtcatttcctcagatgcctgtgtggtcttctatgaaagatcttggagattaaggcctagccagaaccttctcctgcattttacacttatggagaagatcctgtgtcctgtaggatttaatgctgaggggactctgaatctgactgatggttgggtggttggtggagggtcctagggcaagggctccttcaggtgggctgctctgggcttctggggatgggatgttcttgagcccgcagttgtgtagtggggctggaggtgggggaggcccagaggggccctgtctgctcccttggcttcctgtgaagtagaagataccctcctaaggaacctaaggaatagaagatgggaggcatgcctttgctttagtgaaggtgataggatacggtgctgtcccaagtgttattttgggagcagcaagggcctttccactgactcatgcaggcaagctataaatacaatgatttcctggaactttttctccatctatgtgcattttaaatcaggccagcctcagatgctagtgatttgcagattattatcttttctgctaaagcaagaaaagactttccttggctcacacattagcatgacctctgtgtctgggcagagctcagcatgttttatttgttctaataaagtattctcctcacagtaaagttatagattgttttttaatatactaaaatctggaactctctatcaaatttaattctgtgccatgagttcatcagacaaaaatttgccttgaatttcctctcatactttgatctgaattctggcataaatttcatagtgactggtatgtagggtgggagtaaccacaggtgatgatgctataaaaatttcacatggctggcggattatgacctggaagattttcctatggatgcgagaaaattaaaacaatctgggaagctatctcagtacctttaccttgcaagaagggaggctggaaatgctcacaggtctctctcaggttgtgtgacccagtaaggagatgccagctgtactggagaattcacatgctgtggtttttacgacactgcatcacatagtggaagagacaaaactgggtttggagctcagctcagctgcttattcactgtttgattttcagcaagtagcttaatgtttatgcatctcagattcctaatctgtacagtagagccaatactccatggagttgtaaggttttggtgagataataaacataatccaaatatgggttgaatattccttatccaaaatacttggggtcacaagtgtttcaggctttggatatttttggattttggaatatttgcattatatgcttaccaattgagcatataataaaaaaatctgaaatgcttcaatgaccatttcctttgagtgtcatgttggcactaaaaagtttagggttttatagcattttggattttggatttttgggattagggatactcaacctgtagtactgtatttggcccacaggccttagtaagcatgtaaggcccatattcccgtggcctgcaagtatcaagaatttaatgcctgaaatggcaagcctccaccgaggaggataacaccccgacttccttgacccctagcagacaattctgtgattcctcctacccagtttctcagaaggctcgcaaaaggactgaaccccagttgcctgccgtagtacaccattcattgatgtactttttcttgttttgcttccctcctgccctgtctcactttcccctcactcgaataatatacctgttctcaagttcatatgtcaggggcttctttagagaaaacctgaattaagacagctttctttgatatctctgtgtcaatgtgacttcaagatgaaaagtattttggtttgataatgccctgacgatctcccttgtggtagggcctgataaatctaagatttagacaaataatagctaggtgggtgatgtctctgttcatagcctaattccattgtcttttcagtacaaatttatacagatgaaattttaatgagcagtttaaatttatcacatgaagaatagaacatttctgcagtatgaaaagcaggtggtataattgcatctactttatttattttcatgttggttaattctcacagaaaagtataagggtctgtctaaattatataaaattttagtgtattgcatattgctagaaattatcgaaatgctgacaaactagaaatgcatgaaatagagcttaaacctaccagaagagtctactcactgagaatcatggtgtacatttaggcatccctttgctgcacttatctttatgtatcactttagataaatgggatcacactatgcttgctgttctgtatcctgatctttccaattaaccatctttctatttcatatagaggattgcaccgttccctttaaggtgtgcatgatatggatataccatggttgactgtgctttgatggagagatctctcccttcttctctctgccttttctcttccccatactttcctcttaagctcacccaccaccccacgaccccagcccccgttcctttctcacccttgcaaacaaacctctctctctctccaccccgacccccgtgtcctcttcatacccctctgtttctctttttgtccttctcccccatcactccttcacaggtatgagcctcccctcactctccccttgccaagctcccccacaccaccaccttgttcttataatataaacgaggcagaggttattaataatttcatgtccgtatctttgtttcatcatctaattattttcttaggttaaatcctgctggttggagttgcagggtcaaaggctgtagatgtttaaagtgtagctatatgttgccaaagggtgaggtggaacacctgtcaacttgctccatcatcaacactgtctgaaagtgtttcctcacaatcttgccaacactgcttcatgttcatctttttaatcattacctgtgtaataggcagtttcatgtccctgattcctagtgaggctgagaatctttttgtattgttattggccataaatattccttctcttatgatttgcctgctcagaaggcttggccagcttctgttgctacatctctctttgcctaaccacggggaccacttctttcttcttcattttgcctacgttctggacctccctcctgtcaggcacttgggaatgtgagggtggccatggggaagcctacctcacctgctgctgtgctgttccttgtccctccagccccgccccccatatcccctccttctgccaactttatcacttaagacagactgcctgggtcaccctgtttatgacaatagaagaataaggaaaggtaaagaaaagaggggaaaataatgtgagatgaagcaagatgtggacttgagttgaaagggaaagataaaatgaagcccttgtttaataaaatgagactcaggattgtgaaaagcagtgattgaagctaaggtgctgatacagagtggcttaaagtggagtgatagtgtggaaaggaaataggatggagagaagatgcaaagaaaaatgaaaggaaaatgaagggaaagatgggatggttgttacataggagtgatgatgtttatccaaaggaataagcaggaaatagaataaaaaattgtagaaccaatggaaggagagtccacagactcttggtgtaggattcaagcagcatttaaaggaatagcttagaagtaggtggcattaatgcctttacatttatgaaaataggtaacatgatatggggaaaaagaacaaagggctgatttagaatgtaaatctataaaaatgaataaggccaactttggaaatatagaacagttggcttcaactttggtgtctgtaaagagagtgtgaatgtgtgatttatagtagcctagatgattccagggctctctaggtactggcatcagacccgaggcatgtgttttcataaggagaagcggatacactatgatcgctgtgtgtaacagggagatcaccatttgtaatagctgacccagttcttggagccattgcctcacagtcccacacagctgctgtgtttgagagatagcaaaaatgtgcaagaaagtctaagtcagtgacaatgcaagtatgcaaaacctagaggcagtcagacctggaatttgctcagtgatgtttggattttatgtctctatatttatagctatgaaacatcttttattactgagattcctgtaagaaaaatcacactaagctggtacctaacctccttttcctcaatgaaacagttattttcatgaggtaatttttttttcataaaaaggggtttcttctgtccacggagtcagtaagaactacccctctcttctactcttgattcagacctgcctcttctcaaagccatgcctgaggtttgtagcctgaggtttccatggtgacagtaaaaagccttagctctgccttgttccagtcattgagcatctgcctggcagaaggggcagagatggtgtggaggagacatagccattcctttaaagtttcagaccgggcattttcatcatttccactcaaatctagctgggggacctaggcccatggatagacctagttgccaggcagctgggaaatgtagtccttggcagggcagccatttcccagaaatacgtttcttactgcaaaaaaggagaaggggatgttgatggtcagttgtttttttttaaaaccacatcccatatggccaaatacattgagattcacacattaaaaccattgtgatggctgaacagaacacatccagggctagtgtctgtccatgggtagctaatttcctatctctgctttagatatactgataataacaactcattccatggttaagagactatggtacatccatcctatggaattgtatgaagctgttaaaaagaacaggcacgtatactacatggagagctatctcggataaattaagtgacaaaagtatgatgcagaatgtgtatgtttataaatgtgtagacaatttcaggatgatgctaaagaaactggtaatgatagttgcttctgggcaaggggaacagtatgactgaggacaggactgggaaacaagcttactttctgttgaatgcctatttgtatctttttaattttggctcatgtacagatgtcacctattataaaaaatttgcttttcactctttagctgcaatgatggtatctgaaagtaccagagatgtctttcctgcctgaggttacctatctcaatcttccctacgattctgtattcagggtatctttatgaccatctgctaccacctcctggaatgcagctgaaatgacagaaatgttccgagcactttttttttttttttttttttttgagatgaagtctcgttctgtcacccaggctggagtgcagtggcgtgatctcagctcactgcaagctccgtctcccgggttcatgcccattctcctgcctcggcctcccaaatagctggggactacaggcacctgccaccacgccctgctaattttttgtatttttagtagagacggggtttcaccgtgttagccaggatggtctcaatctcctgacctcatgatccacccgcctcagcctcccaaagtgctgggattacaggcatgagccactgcgcccagccccgagcactcttttaagctctgatgcgttcttcagattccatttcagtgcctttccaacactgaggagtagttctggaggacctcccaaagattacattgtgagatgtatagttgggtaaaacgtcatggtaagggctctgtcttaacttggaagtggctgtgtttattgagtggcgaattgagaagtctttcctcggttttctataaatgaatatttgtttctgtaacttaagaagtaggtaaactccttgggagtaagagatgttcctaataccaaacttacctttcaggttctctaaaagatgaatttggccacaaaagcagctctgaccttatatatttccttactgtatttttcctgtgagtgctacttgtttcttttaaaatctggtaggactatgggattcctgacccaccccaaacctttgggcccacagtgcacagctatccaagggttcaatttggcagtctgggcagtttttttgttttgttttgtttttttgttttttttaaatgaaagcgttattgagatgtaacccatatactataaaattcacctttttaaagtgcacaattcagtgatatttagtatattcatagtgttatatataactatcagcactatgtaatttcagaatattttcatccccctcaaaagaaaccccatacctattagcaatcattcccattccccccttttcttcctctatcccttggcaaccactaacttactttctgtttctatggatttgcccattccggaattctgtattaatagaatcatataatatgtggtcttttgtgactggcttcattcacttagtataatgttctcaaggttcatccatgttgtagcatgaatcaatacttcattccttttatggctgaataatctttcattgtatggataaaccacattttggatatttgggttgtttccactttttgactattgtgaataactctgctatagacattcatgtccaagtttttgtgtaaacatattttttctttctcttgagtatataggtagggctggaatttctggttcatatggtaactaactctatgttgaacattttgaggagctattgaagtattttccagagcagccaaaccaatttatttcattagcaatttatgaggattccaattgtgtttcttcacgtcctcaaaacacttgttattgcctttttaattttagccatcctagtgggcatgaagtggtattgtgattttgatttgcattttctaatggctaatgatgttatacatcttttcatgtacttattggtcatatttatgttgtctttggagaatgttcagaatctttgctcatttaaaaattgggttgtctttttattgttgatttgtaaatgttctttatatattttgcataaaagttcctttacagatatttgatttacaaatattttccttcgttctgtgggttgtcctttcatctttttgatggtgtcctttgaatcataaaagattttaattttgatgaggtctaatttatgtattttgttgcttgtgcttttgctgtcatatctaaaaaaccattgcttaactcaaggtcacaaacactcctcttttcttctaaaagtcttatagttttaggtcttacatttacgtcttcgttctgttttgagttaatttttttatatggcatgagttaggagtccaaattcatttttctgcatgtggatatacagttgtcccagtaccatttgttgaaaagactattaattatccatttaattttcttggcacctttgttgaaaatcaattaaccataaacataaggatttatttctggactctcagttctgttctgttggtctataggtctatccttatgccagtaccacagtgtcttgataattgtagatttatagtaagttttgaaattgcgaagcgtgagtcctcctgctttattctttttcaggattgttttggttattctgagtcccttgcatttccacatgaaatttatgatcagcttgtcaatttctgtaaaaacaaaaaagccagctgggattttggtatggcttgcattgaatttgtatatcagtttggttagtattgcggttttaataacattaagttgtccaatgcatgaacacaggatgtttttccatttatttagatctttaagtgtctttcaacaatgtttcagtatacaagtcttgcatttcttttgttaaatgtattcctaaaagttttattctttttgatatacattatacattatttcttggagatatccatgtcagtactgataattttgtatttcttttatatatcatctatatgctggctgctctgttaaaaaccgtattatgaaaaatttcaaatttatgcaaaagttgagaacctccacccccatattattttgaagcaaatcccaaatatcatataattgtatatataaactctttgtatatctctctaagagataaggtcttaaaatacttgagcacaatacctttgtcatacataacaaaattaacaataattctttaatatcatttaatatttggccagtgttcctatttcctgaattgtctcaagtttgtctttttatactagtttgttccattcagaattcaatcgagggctacatgcacattgcacttgttttggcatattttaagtctcttaactgataggttcttctctcagtcttttttttcctctttgcttttcatttattcataaaaagtcatctaccttgtagactttttcacattctgtattttgctgattgtttgttcttccatcccatgtatttcctataaactaataggtaggtctaggcttgattagagttagtttagatttttgacaagaatactacctaaagatgctgtgtacttcttactgcaccacattaagagatctctagtgtctaatgcctttatttttgtggtgtttgattgattaatgggtttacgtagtattggcctgatccatgtgttatgataaagatcccagcgacctttcaaataatggttttatcagctattgatcatcattgcctacatccagtggtgtgtcagtgaatgtttaacaaccggccacttgccaatttttatggtgtaaacactcctgccatggctaatttcattcctactgatgtgttactgaatgtggagtttggaacagatgcacacagttggctctcacaagctggcatgagctttttccagcaaaccactgcttagatccattatttcattggtagttgcaaaatggcgatactctattttttctacctttattaattgggactatggtttatttaagcattttcctattgttggacatttaatttgtgactattatgaagcttgtgagctgaaggagatcataaaacataattctcagtacatcagtaaattctttatatacatctgaatttatagaattgtatgaaaactgaaatagacttcagtaatggtgaccagaaaagtgtcttattcaaccagtatttaatgagcatttactgggtacttggcactttggaggatcccaagagggatatggatatgcccccaaactctgctaatcaatgtcacagttgtgtgtgattgttagaagggtttagagtttgggtggttgctaactagaatgatcagtggatttgtgggcagggggtgcacagggctggtgagctaaactttgaaggatatgacttttcagtcaaatcctattcttttttgacatctgtcttgatttacttcttatgactagtttcctgggtgtctactatagtagcctcaaatctggcttgcttgctttgttctttccttcataaagcaacaggattaattttctgcagcacacctatgatcacttccctactcaaaactcttcaggacctactatgtaatcaccaaatttctggtggaactgaacccgaagccatgtgattatattagctcagtaagggacacagtactgtggcctggagtgcctggggaggagtgtattacaggaaggaagtagagactagaagattcaagttggctggctggccaagaaaaatggagactggtggagaaggagtttgtagacggtgtctttgggaagtcttaggagaacatcccattagggtggtagggttaagccagattgcaaaagattgtggcataagcaaggaactttggtgtggagaagttgtcatcacaaagtcattttgaaatgtcgaaggtttagcagttgttctgactgtatgtcacattttaaaaaataatggtagtggccaggtgcagtggctcatgcctgtaatctcagcaccctgggaggccgaggtgggtggatcacctgaggtcaggggttcaaaaccagcctggccaacatggagaaaccccatctctactaaaaatacaaaaattagccaggcgtggtgatgtgtgcctctaatcccagctattcgggaggcttaggcttgagcctgggaggtggaggtttcagtgagccgagatcgtgccactgcactgcagcctgggcaaggacagagtgagactctgtcgatagatagatagatagatagatagatagatagatagatagatagatagatagataaagatacataagatagatagatagaggtagaagagagccagttccaagatgatagactgtttttatagattgccttcctcctaacacacatttgtattctctctctctcccccaccgcattattcagcgctaatgaaagtgtgatggaaacagctgctagtgaatgaatactaactaatcctgaaaaaaagatgtgtacttcttgaaattttagtttgatttacctgaaaacatatacagaaacacaactagtgatttcaaccaaccctagagttttaatagtaaaatgcttaggaggaatgcatttgtgtaaatgtaatatgagagaggaaaccagacacccatctttgaccaagattgaatctcatgcatttttgtcacttaagtctgcccatgtctccatccaggacctagttaacccttattgcgtatcctatggtacaggaaaaatgagttattagtaaacatggataaattttagaatcatgaagtgtcaatgctaaaagagaacttgaatgtcatcttggccaactctcacatattaccaacaaggagactaagatccaggcaatataatggctttgttctccatcagaatctttctttccttttttttttttttttttaagatggagtctctctctgttgcccaggctggagtgcagtggcgtggtctcggctcactgcaagctctgcaggttcacgctgttctcctgcctcagcctcccgagtagctgggactacaggtgcccaccaccacgcctggctaattttttgtatttttagtagagacggggtttcaccatgttagctaggatggtctcaatctcctgacctcgtgatccacctgcctcggcctcccaaaatgcttggattacaggtgtgagccaccacatcctgcccagaatctttcgaagttgggaaatctttgtttagatctttgttgcagcagatttggtatcaaagaaagctatctacattaaattaatttggagggcacaccctactacttttctacgggcaataacactaattaatatctaaagttaaaggatgtattaaagaatgaatatggtaacctttgcaaggcactcttcaatgtgtttttttctgtgtttccttctatgtgatttaaaatgttagtagatttctctgaggtacttcagggagataggaaaggagcttttgccctcatagatacttggaaataatatatctattttctttttttaatttcaaaaatgaaattattattaaaagctctaaatatagcaagaatataagacaaatagtatactgaacatccagcttcaacaattaatcaactgtgtcccatcttgtttcatatctgtcttcccccacattattaattatacttttttctacccttagcttaaaaaaaactttattgaggtatatagatcataaagtttatccattttaagtgtaaaatttaatgatttctagtaaatttatcaaatagtgcaactttcaccataatccagttttaggtcattttcagcactccaataatactgcacatacctgtttacagttaatccccatgcccagccccaggcaaccactaacctattttgtgtttctgcagattttccttttctgaatatttcatataaccgaatatacaatatgaggtcttttctgtctgactttgtttacttagcatgatgtttttgaggttcattcatgttgtatcatgtatcagtacttaattcctttttattgctgaatagtattccattatatagctatatcacattttgtttatccagtcttcagtttgacagacatttgagttgtttctgctttttgtctgttatgaataatgctgccattaatatttgaatacaagtctttgtgtgaacatatgtttcatttctcttagctagatatataggggtggaattgctgggtatgtggtaaatttatgtttaactttttaagaaatggacaaattgttttctaaagtatctgcaccattttacattcacatcagaaatgtatgagggttactatttctttatatcctcacccacacttattattatctttttgattatcctacatcctagtgtgtgtgaagtgatatctcactgtggttttgatttgtattcccctgatgattaatgatgttgagcatcttttcatgtgcttattagttattcctgtattttatttgatgagatattgtgttagtctgttttcacgctgctgataaagacatacccaaaactgggcaatttacaaaagaaaggtttagttggacttacagttccacgtggccggggaagcctcacaatcatggcagaaggctaaaggcatgtctcacatggtggcagacaggagaagagagcttgtacagggaaattcccatttttaaaaccatcagatcttgtgagacccattcactatcacgagaacaccatgggaaagacctgcccccatggttcaatcatctcccactgggtccttcccacaacacatgggaattatgggagatacaagatgagatttgggtggggacacagagccaaaccatgtcagatgtctactcaaatcatgctcattaaaaaattgggtgtttgtcttattgttgagttgtatattctgtaattctttatatattctggatacaaatcctttatcggatagatgatttgcaaatattttccacagtctgtgacttgtctttttgttttcttaatgatatgttttgaagtacagaagttttgagttttgacaaagtgtaatgttaaattttttccttttggattgtgcttttgatgtcatatctgagaagtctgcctaacccaaggtcttgaagattttttcttgttgtaaaatttttatagttttagctcttacgttaagatcttgaatccattttgatttaatttttgtataaggtgtgaggtaaggatctaagttaatctcttcgtatatgaatatccagttatcccagcactatttgtcaaaaaatactctccttttcctgttgccttggcacctttgttgagaatcacttgtctgttaaatataagggcttatttttggacactgcattctgttctgttgatttatatgtttatttttatgctagcactatactgaatgttttttaacacaggggagtcatacataatcttgcaaagaggtaatcccacgactcagaagtctttaagtatttgctacaatggcatattttttagatagtatatagtagcttatttacttcatttgtggtttgtagcatgttcagaaggatcctttgagctccttgaggttgcagtacttctttgctttgaagccttctgtcatgtttattccctgaatgtagaataccctctgtctagctgtttatcctccatctctgcatttttctgctctacctgccctgtaggttcaaaatgtggtactgattactgctcgatagtagccttgtgtccttggcaaggtcattttatttctccaggtcttaattttctcatctgtaaagtgaaagaatcagattttatctcactacttttctaaactctgtcgttaatattttccttgttgaacagttacaaggatgtgtaagttaatctcttttaactggtgaaaaagtatattctgttccatagagaattaaatgagcttgtatttcggggggtggtgtgtggtcatcaggggatagaggcaggtatttctggaaaggtgttcttggcaaacattttgttacatacactggtgtatatgacatacatgtccatcactgtatgctgggtgatcaagagatatgtataaggtcatacatgcttttatgattagaaaggagagaaagaatgaacaatttctgttacaaagaaatagccatttttatgaacttgccaagaagaggaatggtccttactgatgaaatccttaaagctttgcatgtggctctttacttgattgatatttaaaagtataggtcccactgggaggctcctttcaacattttccattccttgagtgtttttcccccctttggtattcgaatgcttttattttcttcacataaaatattcctagttaggggggatgggagcccctttccacagctgaagttattccaagttttgttccccctgaagaatcggctctctgttcctgaagctttcaatggccacatctgctgctttatttccactcaataagttggaatatattttcatttagttattgattaggggctatgtaaaaatctgaaggaaattagtaaatagtaatgtttatgaataacattttacctagaaatttctaagcgtaatgaaataagaggataaaaattgttagaggttggagttttggatgaaggtaccaggaagcagagatccaataaatcagtatcagaatctgcatgtctttcaataaacttaagaaattgttttaaacactaggaattattagtctgtcttctgaatttaggattaaatgacagtttcttttcctgaagtttttaatgtggttttcaggattggggtatttattattttcctttggattacacttataaaaatttttggctggacaaagccttgctgatacctagtatcccactttattaactataacacttgacgaataaacctgcaattgcttgacgaatatggtcactttttaaagtatgtgggaacaacattcttctctcgtcttcttgccttcttttccctcccaggaaagcagttgttactattaacaagtatattgtcatcttttgcaactgcacactagattattcagctattttttttcttttttttttcctttgccttccaccatgcgatcaaagtattttttaaatttcactttgcatgaaggtgtactttttcttttgactgattagggcatactggataaaatatttggatccaattttaagtcaagagcagactgaaaatattgtaagagaagatttttaaaattaaatttaattccaattttcaaccactgtgtgagtacctactaaacataaggcagtgtgtttaggtgctgtgggagacaaaaagatgaattagacagaattgatagaatgtagctagattaatatctcccaccattaaaggaaaggaacacagaattataaatgcaaggaagagatttttcagcagcaaccgaacaaggaaaaatgcatgagttaatgctatatatatatatatatatatatatatatatataattttttttttggaaagagtggcaactgagggaaacctgaggctttgggtgcacttctgactctgcctgcttccttgcagaagctgtgtgtgtgagtaggcaaatcttgagagttctcatcgagaccctaggtctagagcaaagtgaaatgaatgagtactcgtaattttcctttttcttgactaagtggaaatgacttcaggaaagagagttggaaaagtaaataatcatagctgatatcctgatattgtagaggggaaggcccagagcttcatgctgaactggggacaaactgaagtctgagaagttcctccaaggccattgatagaactccaagacttaggagaatgcactctgctgcagggttttaaaatgttgattattttggtatttccttcgtaattctaaatagcatatttgtgtaacttcttgtagacttcaatttttgccatcatcttccctcccccattatctttctcctccacccttccaatatagttatattataattttggttagattaatatttagtgtttatattattattgttatagccatgtaagacatatagtaaattactttttttttttacttgcacaggtttttgtttgccttggagtgaataatcaacttgtttcttttcaaagtacttgcccttgattcaaccacagacgtcttcaattttccagagttcctcttatgaaattctcacacctcaggtgttctgtcagtttcagctttttgaagcaatagaaactgattgtcttcaatgcctggtacatagttttcatcatgggatctctctacactgtcatccaaggattcccttcctctttttcccatgttggatttcttttattactgtatcctgtgtctttctctttctttgtttactttcttgttttggtgaagcacatccttcagcagcttccttagaaagggtgcatggagctcaatttgagaccctgaatgtctaaaaatgtatttaattatatcatcatgcaggctgctagtcttggatatacaatcatcagttggaaataagttttctttagaattttgatggaattgtgccaatggattctagcttctaatgatatatgaagaagtctaaaaccatttggacatctgatcctttgtatatgacttgctctcttctcctatgccctgctgaaaacttgtaaattattttgactctagtactttgaaatatcatgatataccttgtcatgagtctgttttcttccattgtcctggatattcagtgagtcctttaaatttagaaattcatattcttcatttctgggaaattttattgaaccatttaattgattatttttcctgctgttttctctgtttctctttgtggatcttttatttggctactaccctattttctggaagatttcctcagattatttttgacctttctattctctttctgctatcttttaatttccaagtattctttttgttttgttttgttttctgaatgttctttgtaaatagcatcccattatttcatcttagcaaatagcatttcttatgtcttactgagactttctctggtgactctagttaaaatttcatctgtcactctctaccccattgtctcttttctcagtagaatatgagcttcataagggtatagctttttttttccctgtttttcccatggatattttcccaataccttgaacaatacctcccacatagttagtgtttaaatgtttctggaataaacttaatgatcattctgatgatattaataatatatattttaacgttttctcctagtaaaggtctagtctgtttctttgaggtcatttcttcctgtttttattgatccctaccttaggttagaacattttctgcagatatctggtaatacttagtcatccacttatatttaataatgaaggataaaaagttgcttggaatatatgagcaaattgatggaagttgccagctattggcttcatggtagaatggtctggccaggccatcctgttggagatcccttgatatcaactctttagatgtctcttcctggctgatctgattctctggaacacattctcctaatctctagaaggaagcagcagtctgggagcagaagggaagaaggctggaagaatctcagcatccaaagtgcatatttttactgaatctgtctgttttcagcatggccctcatgccttcatctgggcctggtgccttccctgaaaagaaaactatatctagcattttgctggagtgagaaacatgctgaaactgtgcagaatgtgggagaaaaaactgctcctaaactgcttcaatcagtctttttttttttttttaatgaggatggaacataatcctatagattttaagatagtttaaagaactatttgttgatcacttactgtattttgagttatcaggtgagacagatataaggcatagctactacagcagaggggactgtaagagtagggcccctgaagccaaaaacagcatgaagaatagctagaaccagatcctgaagggtcttgtcaaagtatgcccttttcctgaagggtaggaaataaatccactattagttcattgctttaggtttttattgctttcctcattttacccctacattcagaggtgtttgatgccaccaattcctgagaactggggggcttctgtggtacaaatttgttactccctgctttctcagatctgtctagtcagctattagttgctcatctgttttcccagttccaaatttaaacaagagcatttaaacagttctcttcatttttgtgttaatgagttaagagtgagattagttacatgtatttgaactgctgtctatactcaaaagtctttggataggacatttaataaaacgttgggtcatacacaagaaacaaggaattttacacagtatcaagccaagattttagtttaaagtggtcccaggttgatagtaccctcagatttctggcagaagcgatagagggaagaggaattcactttccacatgcctcaaagttttcctgtcggtaaagttccaaggaatttgagtttagagtcacaggttgctaagcacactaggaaatgaagcacaatgagcaagaacaaacaggaaatacaaagccctcagatactgaaattatataaatatgttgaaagaaaagaggaagaggccgggcgcggtggctcacgcctgtaatcccagcactttgggaggccgaggcgggcggatcacgaggtcaggagatcgagaccatcccggctaaaacggtgaaaccccgtctctactaaaaatacaaaaaaattagccgggcgtagtggcgggcgcctgtcgtcccagctacttgggaggctgaggcaggagaatggcgtgaacccgggaggcggagcttgcagtgagccgagatcccgccactgcactccagcctgggcgacagagcgagactccgtctcaaaaaaaaaaaaaaaaaaaaaaagaaaagaaaagaggaagaaaatgaatggccaagaaattataaaaatgaaaaaaacattttcaaaaaagaccaaatagaacttctagaaaagaacaattctgtaacataaactcgaagactggattttgttagacattaagaacgactaaagagggaattggttacttggacagtagatcgtagaaaattgtctagaacacagtacagttagaaagctcttgaaggagaggggagagaaaaatggtagaaatacaacatttaaagaatcactgagaattgaccaaaattaatgggttgctacatggttcagaaattccagtgaagctcaagcaagtgataaaatgatggtagagaaatacatgtgcagacataggataaagtttgatatttcagagtacccaaaacaaagaggagatcttaaaagcaaccagagagaagatgggccatctaacaaaagagtgatttgactgagagctggcttcttaatagcaatagtagaaaccagaaggcagtggaatgttaccgtcaatgtgctgggagaaaatagctgtcaatttagaattctatacccaattaaatcctctttcaagaggggaaaaatgacttttcaatcaaataaactaagtttgctactaatagacttctcaattaaggaaattctaaaagacatactttagacatcataaaataaactgtaatggaaattaggaagcttttagcactgagtgataatatcacaaataaaaacctatgatattctactaaagaggtacttggaaaaaatttataaccctaaatgcttacattagaaaataaaagctacaaattagtgaactaagcaaccaatttaagatagaaaaagaacaagatatgcccaaagaaagtaaatggaagaagataagcagcattaataaaacagaaagcaaacatacaatacagaggctcaaaaaagttaaaagttggttttttgaaaagagtaacaaaactgacaaatgccagctgagattagtgaaggaaaactggagtatgaggaatgggaaaagacaattacacatgcagagattaaaataataataagaggggggtatggacaccattatgctaataaatttgaaattttaggcaatgaataaatgcctagaaaaatatcatttatcagaatcgacttaagaattagaaagtctgaaaagtcctataacaattcaagaagcagaatcatagtttaaaatcttgtttaaagaaaactccgggctcaggtggctctcctgggaaaatttttatttgatattcaagaaaaaatttccaatcttatacaacctatttaagagtataaacagggcatggtaggggtttgggggtggtgctctccacctgaatgaagcataatagaggaccatatgagaaaggaaatcacttgcaggtctcactcatgaagatagttgcaaaaatcctaaacaaaatatcagctaaccaaatctagcagatataaaaaacttaccaagttgagattatcccaggtctgcaagggtgttttaatattagacaatccagaatgtaatttaccacattaacaaattataaggaaaaaataataccataatctcaatggctagagttacagctctgattaaaatccaacaacaaattatcctgaaaagaagtctcaaaataaggataggaattttcataataatctatttttttcagggattatatatctatagttttattaagacaaaaactgagagtgtggtgtgaagtttacattcaaacaaagttttcaaagaaatctaacacatgcctaaaaagattttacaatgtagctctagatccaagtctagataatatcaagaactgatggatctcatgactcaagacagagcattttgggtatcagttacttcttaggatttgttaaaaaatggttttgtgtgtgtgtgtgtgtgtgtgttttaaagtgaaccactgcccagtatgaaagtttaatctcctgagaccaaggcttttgaaatcactcaactcttgagtcaattcagtgaaacttgtgctgtcagtgactgaactctgccaccaatggtttcagagttcaaagctcaaaagagaatggctccaaaagttgtcccaactaagagcatgggccctttacttccctcctgtcttatctcctctaccaccctctttcccttccccaacacctcagccagtggctaggatgaacaagctgatatttataactttattattggaaaagaaagggtcttctaatttcaggaattagcacctctgaggcagaatgatctgcttgtactgtatactctccaataaaagaccttccttcctcagtcaatttccatctccaaaatggcaactctggtaacttattaactggcttagtcctttgtgagactaagtacattaagtttaggcagggaacaccatggcttatagatttcagacattcacagcttttaaagtctctcacagtccgtatttatggtgccagtgacatttttttcaaaggtaaaatattctggacatagaagcaaatcattagttttctgttctttgcattgcttcaccatgtcccctatcaggccccaaattttaatcaaaatgatgctacccatctccctttccaccctccccattcctccctctcccacataatacaccagtaatagccaaaaactacacatttgctacgctgtaaaaatgtagagttaacactattgggaagaaagttgtgcgttgcggagatgctctttgattatctacagtatttttttgctctcccacacacccagttctgcaagttttgtccttcataaagggccctttgctttttctcagcaaagtgcagaaaaggttgccttgaagcacttatcccccttcccctccactgggacgggtgtgcaaactatacagcttggaatggctttaaaacacttgggctgctgcagggcacagaaacgatactggctcttcaaagggcatcttctcaagctacctctatggtgtcaagacaagtagaacttctttccttcccacctgaaacccacagtcagatgtgatagaggctggtactcaggagagttaattcttgtcatcatcctctttggggtaggaatgccacgtcagcctttcctcatagaaggatatgacaacccgtgggcatttgacattgacttccttggcagggacgaggtcagcctcatcagaatttttccctttcatcaggaacatgagctctccactggagtctgtagctccaataatctgctccggctccaaaccctgagcaaagcctcgtggcttttctgactcttctttcttcttctttggtttgctctcctctcccttatcttcagaatcagaatcagctttgtgcttgcctccctctgatttgtctatctcatgtgctgttttctgtgacggcagaaactcatgaggtcagggcaatccaagttctcttctgactcccatgtgttgtcctcatctgagaatcccttccactttaggaggtactccactttgccctttaccaatcgacggtagagaactttttccaccacatattcctgttcctcctcttctagcacctcctccactttcttcttgttttgttttttctccatagcgtgtgtgtaaagggtgatgctgctcagagcagtgcccaggagccggaaaggaatcggtgctgcgctattggcgcattgggtcggccagggcagtggcgctcagaaaagcagcaagggtagctgcaaaggagccccttgctgaaatggtgtaccgcaggcctcggctaatggccctcctctcagccgaacaaaagagccctgcactctgtgctgcccactgcccactgcctgcaccgccttcataatctattaaagggtatctacaacatacctacagcaaacaccaacaccataccttatggtgagctagtaaatgctcccctttgagatcaagagaagacaagaatgcccattatcaccatttaaattcaacttttacagtagataattctaactaggtaagactggaaaaataaaaaacgtggcaaaggtactgaaaagaggaaacaaagctgctcttagtatttgtttaatatggttgggcacagtggctcatacctgtaatcccaacactttaggaggccgaggtgggaggattgcttgagcccaggagtttgagactgcagtgttaatgatcatgccactgcactccagcctgggcaacagagtgatatcctgtcaagtataatatttttgatataaatgtgggggcttccccccaaaaaatgctctcagaatttaatgaggaaaataacctatgccaactcttgtttttttttctttttctttttctttctttttttttttttttgagatggagtctggctctgtcacccaggctggagtgcagtggtgtgatctcggctcactgaaagctccacctctcgggttcacgccattctcctgcctcagcctcccaaatagctgggactacaggcgcccgccaccatgcctggctaatttttttttgtttttgtatttttagtagagatggggtttcactgtgttagccaggatggtctcgatctcctgacctcatgatctgcccgccttggcctcccaaagtgctgggattacaagcgtgagccatcgcgccaggcctctatgccaactcttacaatgagagattcagaatgaacaacggacacatacctgtgatactgttttgttgcttgaagctcaattgtgagaaattaaaacaattccatattaaatggcctcagtcttttaccctatttcttcttcatatttggggcaatttctgataaaccacaataaatgatgttgtaggtgacatgcttttatctaaaagtgtattcagaaatagacccacacatcatcttttacaagagcagggcatttgtctttaaaaaaaattaaatcatacaaaagaacttaatgagatccgaatcaggatctaaatactgtttctaataactctcaaggcagtgagtagggacagtcagccacagggctcacctggttggttcctctctctcaggggtcactgtcttttgttgcctgattttctagtgccttgaaaactgttgtttcatatttttttttctatgtgtttttggttgttttaaatgggtgggtaaatctctctgttacttcatcttggctggaagcacaagtcaatttaattaaatggctcatcatttcttgtatagtcctcttttttgttaataaggagttgttttaacacacgttaatacaattgcttggcctttcccttaaagtttgcgtagatttattttattttattttatgttatgttatgttatgttatgttatgttatgttatgttatgttatgttattttattttatttatgaatgagacagggtctcactctgttgcctaggctggagtgcagtggcacaatcatggctcacggaagcctcaactcctgggttcaagtgatccttccgtctcagcctcccaagtagctgggactacaggtgtgcactaccacgcctggctagtttttgtattttttgtagataaggggtttatccatgttgcctatgccagtctcaaactcctgagctcaagggatccgcctaccttggcctcccaaagtgctaggactacagcatgaggcaccatgcctggcttgtttcatttgttttgaaagtaactgttaattttaaaggtccaatctgtgaggatctaaagagtaggagccctgagatgaataattcctgaaggctttcagcattctctcctgctgtgtgctttgttattgacagctgttcaaggtctcaccacctctggagttttaacccaccgatgtgtttcataaattttaatgaaagacagatagagagaaatcatagataggccaacatgattgtaccatatccatgcactggctcaaaatgaaaatctctgtgatattaccctgagttacatttgtggaacacaccaaactccgtcttctagcttgtctgatccagctagctaagggaaatcaaaagtaatttgcaaaatcttttatgttcttttatgttcttggtacattgctctgatttattttttaaggcacagaaaattgtccaaatgcatagtacaaatttgcaaataaactacatatagttatttggacgatggtgtttttctaaggagttttgtaaagaatgtggtttaacttgccagtgtgtaatgctaaacttatttcttgtgtgttattatgaactttatttataatttcatagcagctgtttattttcattgctaaggtacaattcagatgttcttggcttaactcagtattctctatctcacaaaatttaaaattagactgatactttgtaaagattcttcagatgtggccagattattttaggaacagctttagttatccctgataataaatattagggagagaaaaagaaattgaggtctttgaagaatccctaaatatcatttcagtctatcactgtcagcctccctcactgctttcagatccattcccaggagcatttacagggtggccaagcttcctcatttgggttccagctctcttagtttctgtagcctactcattgagctaatgagcagtgtagtggctgagagctagggagaaatatgagagaaatcaaagaagaccctttctgacttttgccctagattgtttgaaacgaaataacattagaataatgaggaattgaccacctttcccttgctgcgttttaggtgtcttttctgtaccattttattatgtcgtcttaatcataacagcctacataaatacttgagtttgggttaggatgacaatgaaaaagggattagaaataacgtgtactcttttttcttaagccttcagaaggactgtaaaaacttaaagatgttaaatgcaaatgccattgccattccaagttaacaagcataagagttttttgttgtttatttttggggggtgatccttaatagtatgtgtttttcttttcagctaccaagtcaggattgttacccccaccacctgcgctccctccaagaccttgtccatcacaggtaggagacatatttgatttatgtaaactgttcggtggtagggaagttgtcctatcgctgtgcttctttgcaagggttgatcgccacagatctggtccatgagattcccaagctgataccctgtgaagagagcagagagtggtttaatttattctcatccagccagctccccagcctcatgtggaagagagaaagtttcctcaataagccaccaagcatacatatactagttcactcttggctgtccaggggtgcgtctgttttcatccccagagaagggtagaagaaggggcctctctctaattggaggtggagacatggtttttctgtatagtatgtgcaatctgggtgcctatattttcgtcagtactttaggagctatgttaattctacataaatgaaaaataaatggttatcaacatggggttagtgccgtggttttggcctatggtgctttctgtaggatggtatttttcctcagaacaaaaagctgagatagcaggagggggagaacatgtcaccaagatctgtttcacccctaaattaattctgccttatttacatgtgccactatggccttattcatcaacactttgcagagctgaaaatgagaagcaaacagtggagtgtggtatatggtgctacagatctttccttttgttaattgctgctgaagaaactttctatctttaaagaccctttctgatttttggcagaaaattttgggaaatttctctgtacacagtccctgtttctacttcattgttctgggtggttcagagctatccttccatacggggacatctcaggactcatgagtcactgaaaccacttttaacacatgcttgtccttctttcagtgaatgaaatggtttttagcatccactcaaccttgagatgcaaatactatgagatattggcttcctgctttagtgcgaagggtaataaaaagcccatttcttcctgacctgcatataaaccagcgagaactcctttccaggatgtaacattggccttaagagatattggttgaaccgtcaacaagtatttattgagtccctgctgtatatctaatgccaaaccttagttttgccctaagcctttcattggctgtaatttcttctcattcaaattattagctgtgtctgttgagcatctccaataaatcaggcattgtgctaagtgctttcagtgcattatttaatcctcacaaaacccctctgaggtagatacaggtactaatattatcccttttttttttttaacagataaggaagttgaagtatatgggggctaagcaagttacccaaggtggcatagctagtaaatagtagagccagctcccaaattgcaatctgtctcctaaaggctcctcctgtcaccatcactggagtctgagtgtctatgtgtacagccagacagcagatccattacacttgcaatggaggctttcatcacaggcccctaaggaggaccttgatgagatgaggctcctgctccacaccaacagcaaacctggacttggtcacaacaaaatgagcaggcatttgctagctgctagttcaagcctggggcttgagagccacctggttgaatgcatggaagacctgtctgaattgacttttgtaaccaaccttctagctttctcttcctgcacaaatgccagtagttactacccggtcccaaaatatgctgctgctatcagcagtcttcatctgagctgcttgaggtgggcttcttgcctgcttttggagcttagtcaccaaagatctgactgggggatctgggaattctctagtcactgttaatgaatgagtctgcttctttgtctaccagatttcccatcacaatataaacagtgagcccagtactcagcctatcagctgcctaactatggagatttcagatttcaggaacaggtgtgtaagaaatggaggcagaagatccacattccatttctctcccctattccctcctttcacccactgtaagtgggacacacatattcagatatatgaagtcctgggcaataaacacatggttatatttagtttttgtgccatgtcaagttggtattgaccctatgagcgtcttactaaccactttgtatgggacacctatatattctagtctttcccaaactgcttgtgataaaacagtctctgggagatattaatagggctctgtggtacagatttgcagactgctgcccctctacccctctgggagagtcgctgtgcaagtgagctcactaaaggctttggaggcctacagtaagtaaagctagtaaattttgttaaagccagcaatttcctagcttctgtgaccattgatatctttatttataaaatacctgttaggatacaaaatcagtgtgcaaaaagcacaagcattcctttacaccaagaataggcaagcagagagccaaatcatgaatgaactcccattcacaatcactacaaagagaataaaatacttagaatacagctaacaagggatgtgaaggacctcttcagggagaactacaaaccactgctaaaggaaattagagaggacacaaacaaatggaaaaacattccatccttatggataggaagaatcaatatcgtgaaaatggccatactgcctgaagtaacttttttttttttttttgagacggagtgtcgcactatcgcccaggctggagtgcagtggggtgatctcagctcactgcaagctctgcctcccgggtgcacgccattctcctgtctcagcctcccgagtagctgggactacaggtgcctgccaccacgcccggttaattttctgtattttttagtagagacgggatttaactgtgttagccgggatgatctcgatctcctgacctcgtgatccacctgcctcggccttccaaagtgctgggattacaggcatgagccaccatgcccggctgcccaaagtaatttatagattcaatgatattcccatcaaactaccattgacattcttcacagaattagaaaaaactgttttcaatttcatatggaatcaaagaagaccccatataaccaagacaatcctaagccaaaagaacaaagctggaggcatcatgctacctgacttcaaactatactacaaggctacagtaaccaaaagagcatggtactggtatcaaaatagacatatagactagtggagcataacagagacctcagaaataacaccacacatctacaaccatctgatctttgacaaacctgacaaaaacaagcaatggggaaaggatcaaaggtcaaaataaagggctctattttaaagtgaaatcaggttctgataaatttatcatttgccctagataacattgttttaagtttatcaaggttgaatattcaagtggaatgcttgttttgtgtaatgtatttttcctttgttaactttggcagtaccttttactgtatgttccctagttatagaatcggttcatagattgctcagagctactcatatctctggattcatgtattatgaagaaacaattctgtttcagaccagcttgtgttgattgaatctcaagttttggaagttctcttgtgaggatttcttaaatttgaaaactactattctcaagtagttagggaccataggcacacactaccaaacctggctttccaggttttaagtatgtaagaaaaatgagtttgtacatttgcaatatgcatacagagatatataaagattgtttctacatacaccaaaagcatatattcttttatcaaatgagagagatgaagtataggttttcagcataacatgcagtttagctggctcatacttattcaagcaccactgtgatatgaacatctggattaagttatacaaatggggccctggagttaggaaaaggaataagttaaaagaaacatctttttatttttcatactataggtaagatcaagaagaacctagtgactatatacaaaattaagtagtttgtgtttcacattttcctgtggcaagactagagactagggcatggtcttttggctcagctcagaagaggtgacttttttttgaaaaaagacttatttatagcataaataaccaaaaagcaattaaagtaaactatttcatatagagcagtgcattcttttgtttgtttttgttttgttttcttaagacggtctcgctgtgtcacccagactggagtgcagtggcatgttcagggcttactgcagccttgacctcccaggctcaagtgatcttcccacctcagcctaaagtgttggggattacaggcgtgtgctactgtgcccggcctagagcagtgttaaagtgagagttaaatgtattagcccactgtttgtatcattttaataaatccagtaaattgccatctgtagagtttgtgtttattcttttttttttttttgagatggagtttcgctcttgttgcccaggctggagtgcaatggcgcgatcttggctcaccgcaacctccacctccccggttcaagcgattctcctgcctcagccttccgagtagctgggataacaggcatgcaccaccacgcccggctaattctgtatttttagtagagatgggggtttcaccatgttggccaggctggtctcgaactcctgacctcgtgatctgcccacttcagcctcccaaagtgctgggattacaggcatgagccaccgtgcccggcgagtttgtgtttattctgtaggtcagttctctgccaagggactgtttggtacttcagtagctaagtccttttaatagtgttgatctcatgacagttttcttatggcaattgtgatagagccacagcttcagtgtaactataataaagaaaagattttgggggtgcaagacattatcttttaagttttctattagcaccacatttgataaattggggttccctgcagactaatgtgctcagaattttcctatttctgccactaatttctcaccttatatgtaacaaagttttcctcactagcaatgtaatgagtactaaaaatagcactggaaggtgaaagcactgtgggagaagcatttgatgaatacctttaagcttagagagaccaagaagactcatggaaggggtgagatgaccaatgaaattagttttaaagaaacaacagaactttttttttttttttagctggctaaaagatacagagctttactgcagatttaaaaaaaaaaaaaaaacccaaatgcagagaaacaggcttgcaagaggtcctggtatgtttgaggagctgcctgagatttggaaagccagattgtagggaaaatggctgtagtgttctggaagtggccatggggagcaagcctcctgctcacttccagttccagttctggtagggatgtgggagagaaacagcccctaccaaaggagttctgtctggggagcagaaactgacgggaggacagggttttagcctagtggttctcacccttggctgcacagtggaatcatctgggggagctttgaacgtgctgaggcctggagcccctcccagagattttggcatggggtgctgaggtccggccactgggaggtttaaaaacctctccaggtgattctgaagtgcagccagagttgagaagcactgaattagggcaagaggaaggaatgctcagagaagaggttgagaatatagggaattttattgatgagttcttatagggcacaatgaaaggggttctggagttggggaggcatgaggtcagcttaggggatgtactcagaccctatggggacaagaactcagatcacaaggggcctgggagtcaagggattcttgtggtgactgatgtgaacagggctagaggatgtgacaggaaggtcctgctggaagaactagtcactgtgtgcctcaggtcctgtgtgtactactgtgagaggctagccatgaacacagatggcctcaagaggaaaccagaacaactgtggtccattgagttaattcttcatctaacttcataatctggctagaatcaggtcctgaaagtgatattgaacccaataggaatatggcagtcatgctactctttttcaaagactaattttttagacacaactttttataaaatactacatttgttttatttggaagtaaaaactgcagctcacttaaacttaaatggcagttcgtaggccctgaatttgtgaaatattcaacaccattttaaatactctatccttttaattaatatcctgtcatttaaattattctttccacaagttaatacacagttggtgattcaaaatagtaaattcttctgggagaaattaagagttttagaccacacatacttttttggggcaggggaaggaattcctggtgattatgtaagtctcttacagggctatctaatccatttttaagtgttaattttattaaagcataacatacatactgaatctatttttaatacatactaaatcaatttttaagatagtaaaatgaagtataggttgagtaccctttgtctgaagtgcttgggaccagaagtggtttagatttcacttttttttttttttttttgggaatatctacgttacacttacctagttgaccatctcaaatctgaaaatccaaaatcctaaatgctccagtgagcatttcctttgagtgtcatgttggtactcaaaaagttttgggaggccgaggtgggtggatcacctgaggtcagaagttcgagaccagcctggccaacatggtgaaacctcatctctactcaaaaaaaaaaaaacaaaaattagccgggcggggtggcaggcgcctgtagtcccagctactcaggaggctgaggcaggagaatctcttgaacctgcaaggcggaggttgcagtgagccaagaccacgacattgcactccagcctgggcaacaagagtgaaactctgtctcaaacaaacaaacaaacaaacaaacaataaaaaaagaagaggccaggcttagtggctcacgcctgtaatcccaacactttgggaggctgaagtgggcagatcacctaaggtcaggagttcgagaccagcctgaccaacatggtgaaaccccatctctactaaaaatacaaaaattagcctggcgtgatggtacgtgcctgtaatcccagctactcgggaggctgaggcaggagaattgcttgaacccaggaggttgaggttgcagggagccgagattgagccactgcactccagcgtgggtgacagagcaagactctgtctcaacaacaacaacagaagttttgggttttggagcattttggattttgtattttcggattttggatacttaacctgtattatattgttgtcagctttcaaatatctataagaaaatagcaagaaacattatttaatgtgaacaatagagaaatgtcactgcttttaaaattgcatgttttttttatcaaattaaaactccgtgaataaacaccaaacatcatgaaatctcttgctgtaatatattcaaatgacctcatgtaatatataagtcattgaatcaccttaagatactgcctgttaaagcatatttatgaactttcaaaggtatatacaacatcctaatttttactcatcaaaatacgaatttaatatgtatcaagatagtttctattcatgcatgtattagaaaatcagaaattattccaaagtgaatttataaacgtatatcacttaagatgccaccttcattttcttccaaagtgttactttgttctgtcctacagtgtatgctgtagattagctgaaaatcacaacatgttaatgagtatttcagtgattaaggaaagaagatataaaccaaggctgtaccttcatttgtgatgatgaaagaacatactgaaagctgtaccacactgtgctgaatgtagtaatatgaatgtgtctgtctgtggtcttatccttagtcctgctactgtgtagctctctggctttgtgggaattaagtaagttagtctcatggacctatcgccccttctataaagtaagaagattggactagagggatcctactagtgctaagatgtctgattctattttgtattctctgttcaagaattttttttgtaatatagataaaacttcatgaaacacagttgagggacaagataggttggactaattttctctgctcctccctgctaagtacaactaaaacccccagaaatactataatggaaagaggattttttttttttgagacagggtctcgctctgttgtccaggctggagtgcagtggtgtgatcatggcttactgcaccctcaacctcctgggctgaagggactcagcctcctgggtagctgggactataggtccttgctgccacaccgagctaatgtttttattttttgtagagacagggtcttcctatattgcccaggctggtctcaaattcctgagctcaagtaatcctcccacctcagcctcccaaagccttgggattacaggtgtgagccatcatgcctggccagaacagactttgaaaggtttaaagaggaaagaggactggcatgacagtgaactagagacttcaagtagacagaagaccaataaggaaatagaaagcttgaacaataccatggttcaacttgatataacataactatagaacacccagcatcagcacaatagacatttttctcaagtgcacttggaatattcttcaggatagaccatatgttaggccacaaaacaagtctcaataaatttcaaaagattgaaattatattaaacatcttctctgatgtcaatggaatgaaactagaaatcaataacagaagtaaaatggaagattcactaatatgtagaaattaacatactcttaaaaacacaaagaagaaattataagtgaaattagaaaataccttgagatgagcgaaaacaaaatcatatcaaaacctatgggatgcagtgatagcagtactcggcgggaaagttttagctataaacacttaacattaaaaaagaagagatccaaaatcaacagttagctttacaccttaagaaactggaagaaggctgggcacagtggctcacgcctgtaatcccagcactttgggaaaccaagacgggtggatcacgaggtcaggagatcaagaccatcctggctaacacgggaaactccgtctctactaaaaatacaaaaaaaatgttattctgggcatggtggcgggcgcctgtagtcccagttactcgggaggctgaggcaggagaatggtgtgaacccaggaggcggagcttgcagtgagccaagattgcaccactgcactccagcccgggcgacagagcaagactctgtctcaaaaaaaaaaaaaaaaaaaaaaaaagaaactggaagaaaaagagcacactagatccaaagctagcaggacagaaataataaagagtagagtggagataaacaaaatagagaacagaaaaacaacagagaaaatagttgaaaagttgattttttgcaaagatcaacgaaattgacaaaactttagctagactgaccaagagtataattaagcatgtgttaacctctggtcaaaataaagggctctattttaaagtgaaatcaggttctgataaatttatcatttgccctagataacattgttttaaatttatcgaggttgaatattcaagtggaatgcttgttttgtgtaatgtatttttcctttgttaactttggcagtaccttttactgtatgttccctagttgtagaatcggttcatagattgctcagagctactcatatctctagattcatgtatcatgaagaaacaattctgtttcggaccaacctgtgttgattgaatctcaagagttttggaagttctcttatgaggatttcttaaatttgaaaactattctcaaatagttcgcactgaatgacaaattcaaaaggcaaaggaaatggccatagtgataagtgcaaggagaagagagggtgagaattagtaatgaaataccagcattggaatggaggagaaaagtgtaagcctgtcccccttccttctttttgaaagaagtactcagcattttgctctttatcaataagtgtctttagaattaatcctagtaactaattcaaaagaaaggaaaagttctatgatgacatttattttagtattataaaaataagaacaatacagaccaccttaatatctaggaagaaggcactggtcaagggtaatgtatatctgcctgattagaatattaggcatctattaaaatgattacatgacaaaacagtagaaaagaggggtaacagctgaatacagaggtgtttcctgattgtaccacataagtatatggtagacctttgatggtaaggttttctcatctctgaggatgaccttgaaggtccatggtgcatggtaattggcccctttccagtggtcggatttcgaattacttttacattagccactgttccctccccagtagggttttgagattcttagctgcttagtgaatttctactaactctttttaggggtctaaagggatcgcttaggtgactcatttataatttacctatcttgtcttataacttgtttttataagtttttatattttgggagatgatgtatgtgtagtatttatgtgaattgggatatctgtgaaggtctccagatggttcagtcctaaatgtcaagtgcctactgttaaatacttggagaagactgctaagtaattggtagaagtttaaatggctgttttggtggggaagttatgcagtttttcttttaaaaattttgtcttaaaattaaggattggggaaaagaaaaaaaagtcctctgatatgacaactagaataaaaagtcatttgaagatttaccagaataaaatgacctttggaaactacttttagagaccagctctcagaaatagtgataagacatatattgcataattacattgttacgatgactctagcaattgtgaggttcaaagaaatagtgtactgaagtattatcatctagtcattttttaaatctatgttctttggatagtaaactcttattgccctcactcttaaatagtaattctgctgtgtacagaattttagactgaaagtaatttttcctcagtattttgaatgcattacctcctcttctagcatttattgctgccactgctccggattgtactgtcaatctattttttattcctttggtgcagctttgtctttcctctgggattgcttttaaaagtttatttttactttctgaaggggtgggttgcccctccacacctgtgggtgtttctcgttaggtggaacgtgagacttggaaaagaaaaagacacagagacaaagtatagagaaagaaataagggggcccaggggaccagcgttcagcatatggaggatcctgccagcctctgagttcccttagtatttattgatcatttttgggtgtttctcagagagggggatgtggcagggtcataggataatagtggagagaaggtcagcagataaacacgtgaacaaaggtctctgcatcatagacaaggtaaagaattaagtgctgtgctttagatatgcatacacataaacatctcaatgcgttagagagcagtattgttgcccgcatgtcccacctccagccctaaggcggttttcccctatctcagtagatggaacatacaatcgggttttataccgagacattccattgcccagggacgggcaggagacagatgccttcctcttgtctcaattgcaagaggcatgccttcctcttatactaatcctcctcagcacagaccctttacgggtgtcgagctgggggacggtcaggtctttctcttcccacgaggccatatttcagactatcacatggggagaaaccttggacaatacctggctttcctaggcagaggtccctgcggccttccgcagtgtttgtgtccctgggtacttgagattagggagtggtgatgactcttaactagcatgctgccttcaagcatctgtttaacaaagcacatcttgcaccgcccttaatccgtttaaccctgagttgacacagcacgtgtttcagagagcacggggttgggggtaaggttatagattaacagcatctcaaggcagaagaatttttctcagtacagaacaaaatggagtctcctatgtctacttctttcgacacagacacagtaacaatctgatctctcttgcttttccccacactttcagtgttctgttttgatggcgctgcgatgggtttaagcgtagatttaaatttgtttatgccaggtgacacttggcatgcattttccttctggaaaatcatctttaattttaggacatttagtgatatctctgtgggttttgcttctctacttatttcttctgttttcttctggaactaactatatttctgtcaacacatttaaaaaaaactctagtaatgtgtctttcatcttttttttttcttttttgagacagggtcttgctctgtcacccaggctgtgcaatgggatgatccatggctcactgcagcctcaacctcctgggctgaagctgtcctcccacttcagcctcctgagtagctgggactacaggcgcatgccaccacacctggctaattttttgtattttttgtagagatggggttttttcatgttacccaagctggtcttgaactcctgggcccaagcagtcctcccatctcaacctcccaaagtgctgggatgtacagatgtgagcaccgcaccttgtcactttcatctatttatgttgtgatctttctgggcttgctctggatgaaatcttcatcttccaaattaaaaatcctctgcataactatatagcctagaatttttcctattctgttattaagcctctatcactattctttgattctaggttttataatccattcttttttataacaacctgttcttgttttacttttccctatttttgttttatacccatctattcttttttaggatctattctccacttttaactttgaggattctaaaatacttactttaaagttatttttaacttgttctatttttgtttttgtcaggagcgaatttgccttttttatttggctgttctaccatgctttttggaattttgttttgtaggcttattttgagttggagttcaatctcattctcagttctctgagctcctcactttctgccagttcagtggctgtctctaccaactattcctggcatccatggcctccagtcaagagctgattcttatacttgaaatacagtacttccatctggtgcaggtgtcaggggtcttgtagatggcacccaatggtgcttagcccagaaccaggcttcagtgttatatctgcttcagttcctttcctaagtaggcaacccagagcttctccacaggcttcatcttggttttgcagcttcacaggtagcaaagtgataccttagcctctggcatcagggaatgagcttggtaccagtcccctgcctcatgcgggacatttatttatttttattttttattattattatactttaagttttagggtacatgtgcacaacgtgcaggtttgttacatatgtatacatgtgccatgttggtgtgctgcacccattaactcgtcatttagcattaggtatatctcctaatgctatccctcccctcttcccccaccccacaacagtccccagtgtgtgatgttccccttcctgtgtccatgtgttctcattgttcaattcccacctatgagtgagaacatgcagtgtttggttttttgtccttgcgatagtttgctgagaatgatagttaacagcttcatccatgtccctacaaaggacatgaactcatcattttttatggctgcatagtattccatggtgtatatgtgccacattttcttaatccagtctatcattgttggacatttgggttggttccaagtctttgctattgtgaatagtgccgcaataaacatacgtgtgcatgtgtctttatagcagcatgatttataatcctctgggtatatacccagtaatgggatgactgggtcaactggtatttctagttctagatccctgaggaatcgccacaatgacttccacaatggttgaactagtttacagtcccaccaacagtgtaaaagtgttcctatttctccacatcctctccagcacctgttgtttcctgactttttttttttttttttttttttttttttgagacggagtctcgctctgtcgcccaggctggagtgcagtggcgggatctcggctcactgcaagctccgcctcccgggttcacgccattctcctgcctcagcctcccaagtagctgggactacaggcgcctgccactacgcccggctaattttttgtatttttagtagagacggggtttcaccattttagccgggatggtctcgatctcctgacctcgtgatccgcccgcctcggcctcccaaagtgctgggattacaggcgtgagccaccgcgcccggccgtttcctgactttttaatgattcatgtgggacatttaaatccctgttattaggaactctcagctgcctctgtctgcttctgcaccctctgcctgcttctgcaccctctgcctgacctaccactttgtgatttggccccacagagacctttatcttgcttctgagtgggactgagtcttttaaattttaacagttcatgctaacactctcacatctgtcattgcatatcattttatgtaaggggaagttgagattcagagagcagaagttaactacttgggcctcgcagttggtaagtaagccagcctgctgtagaagaaaagggctggaaaaggtttctggggaagtgctagaaatttaataagcatgtagagagagaaaaatcattcattatacatcacaaaaattaactgtagatctgctaagtaaaagttgattaaatttctacactctgtgcccaccaataattttctaaatgtgaactctttcctacattaatctcaaatgcttatttttaaagtgccttccccagtgcagacttacattcatcttagccaaaatggccttcacatttggtctgtgggacatatttgatgtagcaaaaggccaagggtaacccttattctaccccctaaaagggaacagaaagagaacttttgcataataaataattatttatgcatttcaaaattgattttaagagtacacaaaccatagaggctttgcgattcttcatgtattttattaatttatcaagcacttcaacagagtgcccgatgctcttctagatgctttacaaatattaactcatttaagcctcacaacaaccacgtgcagtgggttctattgctatcctaacattgcagataagtaaacaaggcacagagaacctcagcaacttgcttgaggtcagtgacagaaagaaagagttaaggctatgattcctaccttggctatttagccccagtgtaccagctcctactatactactatgctgtgctgtgaaaccacgtctcacaattattttattaacaatcaaactgacacactatctttgtcagggacacattttatttcatggaactagttaaaaattagctttaactcacttctggtgacttgttttctttcttaggttcttcctcattatattatgcccatgctattgttatataaagctcactctgctggtatcattcttctggaagatgccataaattcatctaatcatttcatcagatgttaacggaatgtgctcactgtaggcccacagtttgctgagaactataggagcacaaagattgtgatgtgatccttatcctgtagttcctttatcctgcgtcaccctctcacagcagtcatgcccaacactatctattctatagtctctcatggttcttacaactgagtcattttctgtgtgtctcatttaaacccatttcttaatgctttattgacacaggttgtaagcaataaactggtcaccatgtttctaataactaccaatatagcccagttttcccctggggggctcagttatggtggttttctaggtttctgagcaatggaatcctcatttctcttctctgctgtcccctatcgcactgtgacttttttttttttttttttttttttttgagaaagagtcttgctccgttgcccaggctagagtgcagtggcgcgattctggctcgctgcaacctccgcctcccaggttcaagcaattctcctgccttagcctcccgagtagctgggattacaggcacatgccaccacgtccggctaatttttgtatttttagtagagatagggtttcaccatgttggccaggctggtctggaactcctgaccttgtgatccacctgccttggcctcccaaagtgttgggattacaggcgtgagccactgtgcacggcccacactgtgactttaaggaagcactcctgagggggtcaggggaggagcagatgtggattgggaggatgcccaaatgtgctactgtgctaatgggaaaggacaatggaggacaaccaggggttgggctcagggaggcagcttgacagaggatttaagagcatgggcttggggtttcaaatcctatctgcctcttactggctttgtgactttgggcaagttagtctctctgtgcctcaatttcatcatctgtaaaatggggatcatggtagtatccattttcatagggttatgatgattaaatgagtgaagatctctaaagcacttagaatgatgcctggtgccatagtcaaccctcaataacatttagctgttataattatcatcaccacaggcctagtgaaacagaggtggggtctagttggcaaacacagaacagactccagatagctagaaattagttgcaaccagcccagaatgagtgctgaagtggctcgctaaagcacttgcagtcaaagcacattgttaccctcatctgtgacctttcatgggctgtctctctgcctatgtcaggggttggcaaactatagcctacaggccaaatccagatggtcacctgtttctataaataatggaaatgtgaaggagaatcaattggcaagaggcacgcatagcgcatcttcaaccttttccatcggggaacatgagtcttgagaatcctgccatagatcaaaagaatggcaatgagaagaaccagtggacaggtggataggcctccccatcagcctttaaccctcctgctcttatctcaaggatcatatgcccgtgtctgtggtttctgatttttccttgaggacctttgaccgagatgatctgtctttcagactttactagcaaaattctgagcagtatcttttatacaactggcagcttcaaaggcttgcagtgggtaggcctccccaactctgtttcgcaagataattaaaagaagccagactccttcatccttgaaggagaggaagaagaaaacaagcctgtccagagaaaatggggtgaaggaatttttctccccaacttcctcctaaataccctgctctgcccatcaaattttgtaagtatcacccagtggtgtgttggtaaaccttctcccctgcggggtgggggaaagccccaatttgcagccgttgttgctgtctgtgttgtgaatgctcccaccatgctgactgcaagtggagctgggaagagatgtgtaccatcggctcactaacactagcatgctctgtggtagacagcttcccttgcctctgaatccttgtgtcaggattctacgtgccaggcaacaagagctttttttctttatgtatcatgccagtgattttagtctagggcactgttttagcccaatcccagaatgtgctattagaaatggggccatatttttgaagttgctaggggcaaaacttccctcttgtttatgtttaacttgtgccactaggtggcactttaaggacattacaggaaatcggctctactggatttttaaaacttttttttttttgagacggagtctcactctgtcgcccaggctggagtgcagtggcatgatctcagctcactgcaacctccgcttcccgggttcaagcaatttagctcactgcaacctccacttcccgggttcaagtaattttcctgcctcagccttccgagtagctgggactacaggcatgtgccaccacacccagataatttttgtattttagtagagatggggttttgccatgttggccaggctggtctcaaactcctgacctgagttgatctgcccacctcggcctcccaaagtgctaggattacaggcgtgagccactgtgcctggcccaaaacactttttattgaagtataattgcatatagaaaagcaagctgcacatttaatgtgcaactcaattttcacaagcagaacacatgcatataatcagcacccaaatcaagaaacagaatattactagcaccccagaagccctccttgtgctgttttccagtcgctatctcttattcttagggttaccactattctgacttctaacagcataaattagtttgacttgtgttctactttatataagtggaattatgcggtatatactctgtgtctggctttttattaaatgatgtttgtgtgatttattcatactgttgtgtgtaattgagatcattgctgtatagtattccattgtatgtgcaaatataacactgttttctactattgatggacatttttgtacttttcagatttgggcaattatgaatagtgctgctgtgaacactcgtatccaagttgttgagtggatgagtgttttcatttctcttggatatatacctaagagtagaatttctaggtcatggtgtaggcatatgttcagctttagtaggtactgccaaacagttttacgaagtgtttgtactgatttacactccattaatggtgttcccactccagttccatgtcctcatcaatgctgaatttattttatggatggttcctaactcttaacataatttttatagctccctttctggccagctatttctaattgaaaaattttaaagccacattattctgatggacatggctcatgcaggaagggctatgtcaacccaaaaggggacatttatcacagtctaagtgtgaactatcagtaagtcggaaaggatgttactctaatactccatcacactgatacacagagcaaagaaaccaggaaaggaattcagattgtaagtgtgataaaatatcggttcataggccagggctctgaggcattttgaaatttgtatatacatttgttattattgccaggcctatatatgtcagagattggggcccaacagaaagaatttctaaaggcctcataatgaagtgcctttcaattgtgctgctggtgggtgcctgttttactaagggtctctttggtttggcaagaggcatgcatggggcatctttcttcaacctcatccctggggagcgtgagtctctagagaatcctgctttagatcaccttacctgtgaggctcatgttgttgactctgcagatggtgttataatatggctttaggtatgtgatatagagagtacagttcagacttgactcagatttctgttccattactagaaattggacatagaagaacaaaacccaggtcatggtcaaaatatttgtcttttagaccaaaataaagtgctcatagtcctttagttgtaacagtaagtctgtctcatggatgttgtccataatctaatgggttccaagaatccccaaggcattctgccatgtgactcttgaatccagcaactagttgcccattatagtcactggtacccactttcaccaaagttgttcctgagcccctctgtcagtgttttcctgagtgtctccagtgttggattggtctaccgaggggggtgcccaccagagatgttcactgcacactgcctgagatatccatgttaaagcagccgtgaaacatgaaagtctgaccgggcttttatttttaaaattttctccccccaatattagtagcggtaatatccagtggcacagatttagactgtggatagcctgctttgtgggatctgcttatattctaaattggagccagcattttctcagcctaggttttcatctgtttggcaaggaggaaaatgcccttatgttggattggctgctgcttgcagtaggaggaactatgcctgggaaaccaatcataattttaatcctaatgataatagtagctgctgttgtcaaacagttactgtgtaattgtgcttagcacactagacagatattttgcttaatcttcacaatattgtgagttaggtgaattatcccactttgcagatgaagaaattgcagctcagagagactaagcatgtgaccagctcacacaatgagcaactgcaaagcctgggtttgactccagagcctatatcctgtaactgttctgtgctctgtgggtgcagttaccaaggaatgaattactgacctcttctccagtggaacatgaaacagtattgggttcattgctggcttattccacacattgattagaggacctgttgtttgctggcatgcagcttaggtatcaagaaaatgatagggaagcaagacagatcctgccctccaggtgcttaccattcgtttatcatgttctgtctctcacaggtgacttgagtcatggattttggtaatcattcttgctgagaattcagtctcttggaccttcttgaggctctatttacccctctctctgagcctggttggggaatgatggggtggaacagtggtgtgctgggccattggttctacatcttctgtgactgggtttagcaaatggctttctgttgtgttcttgcctagcggagatgggggacaggtgaaaactaggcaccaaatgacatttagaatactgacagaatgctggaaaggccctggaggcagcagcaggattgtcttcttgtctgcctagaatttagctgctgcctttgtgatccccattcttggaatccacctggatccttggatgataaagcctgagttcgtttttctgacctgccaatattgcaaacctaaaaaaaaaaaagttacctattatccacaccttggcaaagttctacagatggacttcttttttttttttttttttgagacagagtcttgctctgtcacccaggctggaatgtggagtgcagtagcgagatttcagctcactgcaacctccgcctcccgggttcaagtgattttcgtgcctcagcctcctgaatagctgggattacaggagcgtgtcactacgcccagctaatttttgtatttttagtagagacggggtttcatcatgttggtaggctggtctcaaactcctggtgtcaagtgatccacctcccaaagtgctgggattactagcgtgagccaccatgcccggccagactattttttaagtgggatttgactttttttttggttgcaaatttgacttttaaacaaaatcttactgctgaagattttgcccagctgcaaatatttatctatagaaccatgtggcatatacccccattccctctatgatgaatggatgagaaaacaattaagaagcctagttagttttgcaagagcacctgtggccttgcccagactagggccttggagacttggttttctcatctcttaaatgaagagtttggaccatcagtggttcccagttgatctgggctggctacataaaaatcacttagggtgcttgttaaaatataagtttctaatgccccatccctaagggattctgatgagggaagtctggaatagcatctacaaatctgaatttataaaaagttccccagataattatcctgctctggttatatttgggagccactgggctagagggtctagaacaaacataattaagttagggagaaacttctgatgtgcttgaagatttggggaatacctatatgcctggagcaggttccatatgggcgaactaacccagttatgttgcagaggtaaattggagccagaggatggaagacctttaactggctgagggattgtgttgtgtgccataggctttggggagccagtgaagggctttgagaaaaagcattttgattagatggtgctttaccagattaatttctcagtggtgtgcagggtggatcagagtgcactagaactgaaggctggaaaaagacccagtgaagtctttgcagtggcccaggtgataagtgtgacgagtacctggactcagatgggaccagtgggacctttgtaaagctaacctgcctcagtggaactggaatctgagacatactgttttaaactccttaaaaaatgcataatttattaatgtcatgttcatctgcctaaactattataattaactatttttattgtgtttttgtccaagaggttttaaaggagccctgtaaataaattcatgcaaagaagtagttggcagcagcaacagctgctaccgcagggagaagggacccccttctggccaggcagcaacctcattctcaccctgtctccatactctaagccaaagcgagaggggaggggagtgcaacaggggcccctggagttggatctgccaaccacagtggagaatgcacctccccaagggttaggtgtggaatatggcgtttggcattaagtcaaatagaatattcttcctttgttcctctaaaatccagtctatagtcaatgtttctcaaagtatgttccacagaacattagttcttcaggatgttaatagaagttacatgagaataaggagatgaaaccaaataaatttgggaactgatgggctacgcaaaggcaagtgacttcctttcagaatttcagagtgtgtaatgttctgtgtgctcagtgaatctccaagagggagatagaccaggcagtgtttcctaagcttatctgtagattcttcttccccctaggccaggggctgacaaattatggctcataggcctcatctatcccaccactttttttttgtaaataaagtttattggaacacagttgtgcccattcatcgtattgtctgtagctgctttagcacaacaggagagttgcagagtggctacagaggtagtctggccctcaaagcctaagatatttactatctgcccattacagaaaggtttgctaatccctgctctagacaattcatggaactggtgcttcctggtaccccctttcagagatgctactagaagaagatatacatgggttgttctagcactgctttatgataaatctgcctcattttattctgtttccatactgccatcattcctgcctcttgctttaaactactttatctctcaaccatttacccattatccaggatccaaacctgggttccatgtgtccttatcttttcttgcactcacaacattccaaaaatggccaagggtgtcttcaatttccagtctgggtagctcttaagtcagcccgaacccattcctaccaacctggcctacatgaccgtcatcttttctttttcagcattcgaattaggttccttttccccagatatgagttacctctagtcctttttactcactgaatctagaataacctttgtaaaatacaaatctagtcagattgattccttacttaaaatccttcagtggtccctgtggccctcaggataagctcagatcctcaggatggatgtgtgtcagtctggttgggcaaacagaaactactcctggtatttcgtactggaagagatttaatttaaggaattagttacttaagaaaaggagtagatatttccaggcttctgcctgctgtggcatagagaagggcatggaaatgggggatggtgttgagtgtttagcaaatgacccagaacaaaccaggtctgggaaaccatgtgttatcccctgctgcccttctccagcttcagctctcccatttttctcctgactcctcacccttcctccaccctgcaagtccccaaattctagatatatcaggatgcctttttgtccccccagaaacttaaaacaactgacatttacgaactcacagtctctttgggtcaggaacttgggagtgacttagctgggtggttcggggttacatcctctcatgaggcttctgtcaagatgtcttccagggctgcagtcatctgaaggcttaactggagctgatgatccacctctaagatggctcactcacagggctgttggcaggaggcctcacttctttgctgtatggaccccttgttaggactgcttgggtgtcctcacaatgtggcagctgactgtctccagaacaagtgatatgagagtgagagatagagatagaaacagagacaacaaggaggagcatactagagtgctttcagtcccctctcctgggagtacgttgcatagtgtctcaggtcagcttccctagaagcagaaccctgagatgaggattcttcaaaagtgatttgttgaaggagtgctctttaggaaaaaacctagaaggaggagagggaagaaaagtagggaaggggaaggagccaagcaatgatatagtctcagataaaatctgaccttggcctgatccacacaggcaggattctggtacataattgcataatagagttaaccctgtttgagacaggggactggccttttatatccttctctaagtcagtcattataggctgctggaggtgggggtgggaggtaggctcccattagttgagaataagtctctagagaagagggtggctgtgagtcctcagtagctaacactcagagcagctgggggatggtgtgccagccagggaaaggtgacccaggtggggccaacacagcacctactacagtgggcctccccgtacccatgtcccaagcacctaccatggtccctgacataccagaggtacgaaaaaaatatctgtgtaattgaataaatgaatgcatagaaatgcttagcctctctggacctgtgtccatttctgggaagtcagctcagcagggatcatattgtcccatcaaccatgggaatggtcgaagacccaggacagtttgccacatcatgagtggcagcactgtctaagtccaggattttcattgcaaaattagagtgaaagtatatttgccatttgtgaataaggaagtattaatattacaatattatatatttttaaaaggaactttagctcacatttcagtgagctctttgctaaaagtacattttcctggtttgtcacatcctgactgggtacatgttgttacacatggaaccgtgagggcagaactgccatttgttatattaattgtaatccatatatctgtttttttcccacaagaatcagtcactggatttcagttcagaaaaccaaaactgtcggacaaagccatattatcgtgttggcagagttgttccccatgaccccaaatacacagaggaggaagagaaccactgaggccccttgttttcttggattatcattcttccaaagttggtaactaagaaaagtctcaagaaatagcaaagaaacctccccaccttattctgctttccacatcccaagcctaacataagcctcaaactatttttatgaaggaaagcttattgtgaagagggtcttttacatgcctaaatctcatctttagtttttcttatcacacagccggttatctttgcccatctcttttcctgggataatgtctggctctgtcaaggctgtgccttattctgggaccttcctaatgcctgtgttccaggtccctcctgagattcgctcctccgaatgcttgatagatggatcaatttaggggattgatggtcagatttagcctgacataacaccatgcagtggtctgttaccagacatagagctggaaaacccaggcccttgcatacaagttcaggaaggtaaatttgcaaatgaaaaacattttaagacacatctcacagctgcttcctcatcccccaccctattgtttgtgtttttagagatgtttaagagaaaaggaggcaataacaaagacgctctgctgtgctttggaatcctcatttatgttgaaaaagggtccatttatcatctccttggatatttccacaaggagactttgctcatctcaccagggaatggagtggtagagcaaacacttctctgtccacctgatgatggaggagaaccaactaactgaaaggcagagagcctgaaattattatcctctctctgcctgcctgctgcaagatattgctgcatacctgtggtccctgcaggaggctgcatgcgtagacttgggccagaacatatattaccttccaagcaatagatttctaggtaaaaggcaagaaggggcctcaggttcaagttgcattcttcagtggggttcacaggaggccctgcattcagggggttactgggccctccttcagctgttaataaaactgacttttggctcatagagcttggagtatgcgtccatttgtatgaacctccagggaaagcagggtgagggcttgtgttccctagactcctggcagtgaatggctcctggacagctttgcttggttgtttcccaggtacttcaaactcaatctgcctaaagatgagttccccctcactcctgcttctcctgtgtttcccatcttggggattgaccttagtgttcttgtggtagccctggctgaaattatggatgttggagcatgggaggccctttgtgaacttacttttgggtctttctcaccattcccacacattgctcttttagcccaggcctcagctgagacatcacctgctcctgagtctttgccgacccatgagactgggtgcttctgtattccccatacttgccctccacagtccactgaagcaagttggctttgtcacttccctgttgctcccactagacttcaagcttctcttaagcaggatctgtatcttgttcatccttgagtgccagtgctagcacagggcctgcctgtagtagctgcttaataaatatgtcttgaatgagtaacactcaggcctgagaatacctgagactgtatggcatagtggttataagcttagctttggaaatcaaggcctgtgttcagactctgctatttgtgtgattttgggtgagttccttaacttcttgatcttcaatttcttcaccaataagatggggataataactacttcctagggctgtgatgatgaattgcaatgatccatgcaaagccctttgatcaatgtatgacacatagtaagtgttgtgtgcatcatagtacctattagtaacaacaacaacaatatagttatcgttaatggaagggagaaagctataagaactagttggaactagaagtcaggaatattgagtgcttgcatagtggatttagaggagatggggaattgcttgggataaaatgtaggaacagatgggattaccctgggagagaatgaacagggagggaaaaatgggtggagcaactaaagacagaaccttgagaaatcctacatttgagggataagaggagtcaaaacaggaaaaagagtgaatgactacagttaggagattgcagcttctcagatgccaggggcaggagtttaaaaaagatagtcaaaggtgctatactgggcagaagatcaatgaggagaagacgagaagaggtagccataacgtgttaaatgggggtatgttagcgcccttgggaactagccatttcagtggagtcagaggaagaagccatgctctgaaggaggttagagaaggccacgttagggatgaagtgggcatactaagtcagtttgttgtgctacaatgtgtgtttctgtaatgaggattatctgtgggtcagtagatgactggtgtcagtatgatgtagaagtcacattggttcatatgtagggttcattctcagcacatgaatgttttggcatcactggctactagtggctgaaagcagactaacacacctgaaggcagaagactgggggaaatgggggacatagagagctgctcatgaggcgcagtcaccctgtgttcttccacttgactgattggcacccactctgtcttgaagtgctttggggacattccttgccaatcttggtgagtttagtcactgattccattccactcagcacccttgacccttctgataactccttcgaccacagtcccccttccttttttaagaagggccatatttactagagtttttttttttttttttcccaaactgtgtccaggtttattaaagatactttttgtgaacagtcatggtatttcaggcaggacatgagcgacaatcattaacagtatacaactttcagactccctccttcaatggacttccaaaatcagaaagccatggtaaaacccaatgaagtcttcatttggtaccctgaagagggaaagttcagagtgagggttgacatttcacattcaacgtgctgtttaacaacttttcatgagctgaccctgactttcaggaaatgaaatgaaaatggcagaatttatctgaagatccacaatctagaaacagagcacgtgtctttcaagggttctcgctggaaagtccagattgccagcctgactggtaaccagttattgggggccagaccccaacaggtatctgggtttgagggagttaagtgtatactgaaggcagagagggagagggggaaataaagaggaatttgtttctccacaccacaaggcctttgtgcgaaggtgactgtgtgtgtcaacgtcagacagtccctctttctgggagccaagaagatgtctttaaaactagaagggaaaggtgttttctccacatcagtccagcttcatagacattctttttcttttttttctttcctgagacgaagtcttgctcttgttgcccaggttggagtgcagtggcacgatcttggctcactgcagcctccgcctcccggcttcaagtgattctcttgcctcagcctcctgagtagctgggattacaggaacccatcatcacgcctggctagtttttgtacttttagtagagacggggtttcgccatgttggtcgggctggtctcaaactcctgacctcaggtgatccgcctgcttcggcctcccaaagtgctgggattacaggcatgagccacggtgcctggcctcagagacattctattagtgacatataccccttctccataaaacaacaatgacgtgttccgtgtgctaacaacatggcttaaaataaaggcataaaaacaattctgcatttttataaaacttaataaaaaaataatacttcaaactgcacagtcaccagaaatacacagttatcaaaaatgcacacacttcccttggcatccccagcgccttcaactttctgtgcctgctctgttttggcctctgcattttctgcagagttattcccctccttgccagcatgggctttttcctttttcccctttaccttctctcccttctttgcaggggcctctttaggcttgggcttcggaggagcaggtttggcagacaaccttgcagatcttctctgtggtttgtccttactttggttttatctcctttagcgtccccttcagcctttctcttgggcatggtggaggcgactgcagtggaatgtaggtgctggatctggggatgcagcagtgcgtgggctttggttggcctgggggatagttcttacctcttcttcttcacactgctcatagagtatttctttattagaaatttaacatttaaaaaattcagtgtttttaatgatgttgattgtttttgttggtgctcaagttaaaatctttgttttcaaccctgtttttccgataagccttgttacttttagagtttgttgttgcgaagcattagttttttagcaatacatatgttcaattacagaagaaattcccatgattccttttcctaaggttgaacaatctgggaaggagggatgggaaggttaatagcagcatctatgggaggtttttcccaaggatcagcagacttaagcattcttggctgcaacttggcctaaatcagttttcccttggtgactatcttcctaagtgctctttattgtatatttaggtgattgtggttttgcatttctgtcctctctctgatctcttgctacagtctgaacaagtgtcggaggccgagttactcccacagctgagcagagccccatcccaggctgcagaaagtagtccagcaaagaaggtaaggtcagcctgaggatgctgtcagatggcgttgcgagtcccaccccgggcttcttatctctattagctgatctattgttttaaggtttctgtgtcctgaaatgaatgtcaatgatccagatttcctagaatgtgggttctttgtgaagattggggtcctgaagattcctgggcttgacccttgatgcattttgtacatgacagtacatactcaacctccttagccccccagctaaacatggtggccttgtttatggcaagagctaaaagggctgtggggagggacagatgtctttagcaaaaccccatccacctgctaagcctctgtgaatacctcttggggtggggtagtctctcctttttggtctttgtaccatggtttcctcttgcatcgtggcattttcacctggcatctgcccagccatgccattgggtcacctgtaatttgctcagtaagtacccctcactcatcatgctctccattcatctcctcaccctcttcttgtccttctcccaggctcttctttcagagagagtgggccttgggctcaggagcacaggtgaggtagagtcctccaaagaagcagaccaactgtgtccttccagaatacactgtggctctttttcttgactttatgtaggaattggggataggagaatgatgagcatatgactaagacctttaaaaacttccaaagcttaggtttttttttgtttttgtttttgtttttttttcctgagacagagtctcgctttgttgcccaggctggagtgcagtggcgcgatctcggctcactgcaagctcccaggttcacgccattctcctgcctcagccttccgagtagctgggactacaggcatcttccagcaggccggctaattttttgtatttttagtagagacggggtttcaccgtgttagccaggatggtctcgatctcctgacctcgtgatccgaccgtctcggcctcccaaagtgctgggattacaggcatgagccactgcgcccggccaaaatttaggtttaaaaggcttcaaagtgaggcaggagcctatcttgtcttcagttaggaaaggccccatggtgtgagatgcacacagggtctgtgtgagtttcaggtgacaagaagtaatagacttcttgaaacatttaaaaagaaaaagaaaaaagggaagaccactggactctgatgcctgtgtccccccagttcttgctgagccatgggtcagtaaatagagtaccctcctgatcttggggttggggctaaaggcatgtgggacactggaaggaagagtggagggaacattgaaatgtttaactttttaatttttattttgttttaaatccacaggatgtactgtattctcagccaccatcaaagcccattcgtaggaaattcagaccagaaaaccaagctacagaaaaccaagagccttccactgctgcaagtgggccagcttctgcggcaaccatgaaaccgcatccaacagtccaaaagtaagtagaccacataaacaagagtgaggtaggaatctcgctctgagatgtcgacggatatgtaaatgtgttgacatttacgtgcgcaccaacagaaggatttcatggttgtaagtttatcttgctcatctctgtgatgggattcaagtctcccagtcacatagaaggctttataagctataggacttaacctgacctaaaggggcaggcgagtcctaggctgtggtgtttggtttggtttgatttctttcccttcctctcaccttctgttgtttcctactcctcttccttgtgagggcccaaattttcctggcaagatgaaagtattgtaagtggcaattttgcctctctgcctgtgttatctccttttccttcagggcaaatggctagctccttcacccacagacacactttcagtaggtgtggtatgtgattcttttaaaatctccgtaaagagtttctgttgttggtcgcctcagcacagaatggatacatgcagaacttccattatatttatctaaccagctggaacaggtattggagggagggtgaagacacctgtggacatggccagggactgagacaatgatgctctggacaaactatccttctctgtaaaactttggctttgagaagagccatcacttgcttcaatttctttgtagtgaaattgagggaggtgttgaggacagaaacctgctcctgtcacttgactgcaagtgagcctgaccggtcactaacataaatgctcaagacccatcatgaccctgcttttggggtcttgcaggtctcagatgctgctgcagattttcttctgcttacacgttgtagaatgaaaagcagcaggttctgtgggagatgttagcaacttgtctttgaagccaaagtcccattctgaatctctgcagccctctccttcagaagattttctttttttcaaatggacaggtccctggtggtatcagtccataaaggaagtatattttgttcatcacattcaccgagaactttgaccatcttccagcccctgttaagcctggaaggtgaagaatccctatcagggacaaagatggctcaattttcttccatgttctaccccagcactccactttaatttcagctttatgttcattttagtcagcagtggcttaacagtctccagagtagatgtcagggcatctggtggagttcatacagagatcttttctttttctcttttttataacagctttattgcaatataattcacatagcatacagttcatgtttttaaatgtacaattcagtggttcttagtttattcacaaagtcatgcaaccatcaccacaatctaacttttgtcatgcctaaaataatatatatccacgcccattagcaatcactccccattctctccttccccctcagcccctggcaaccacgaatctcctttctgtctccatggctttgcatattcttgtcatttcacataaatggaataatgaaacgtggtcttttgtgactggcttctttcacttagcataatattttcaaggtttatccaagttgtagcataaatctgaacttatctttttatggctgaataatattccattgtatggatagaccacattttattcatccattcatcagtcaatggacattttggttatttctgcttttttggctcttaagagtaatgccactatactgtttgtgtacatgtttttgtgtggacttacattttcatttctcttgggtctgtacctaggagtggaattgctaggtcatgtggtaactctgtctttaatatttcgaagaactaccacacttttcatagtggctgcaccattttatgttcccgttggcaacgtatgagggttccaatttctccattttgtcaacacttatcttttttttttattatagccatcctagtgagtgtgaagtgtgatctcatggttttgatttgcatttcttttgtggctaacgacattgatcatcttttcatgtgcctattggccatttgtttatcttctttggagaaatgtgtattcacaccctttgcccacttttaattggattattaatctttttacttttgagttatgaattctttatatattctggatacaactcccttgttagatatatgagaaaattgagccctctttgtaaatattttctctcattctgtgggctgtcttttcactttctattttttatttttattttttagagacaaagtctcactctgtcacccaggctggggtgcagtagcatgatcatggctcattgtagcctcgaattcctgggctcaagtgatcctttccccctcagcctcctgagtagctggaactacaggcatgagccaccattcccagccaatttcattttattttttatagtgatggagtcttactatgttgcccagtctggtctcaaactcctggcctcaagtgatcatcctgcctcaacctctcaaagtgctgggattacaggcctgagccactgcacccagccaattatcaatattaatcagatctgtacagtggtcacagtccattctagttcagttgctcttttctagaacctatctcccagtaatggcacatatggctgtttttctaggagaacatcagttgctcttttgctctaagaattcggtgtttcttgctgtgggatgaaaggttgtagattatccctgtggtaactgcactgatttatcatcccaaccatggacggttttgaaaagtaaagagagtgctaatgtacttatgctggacagacagttttaaatggagactgtaatgggcgcagtaggatgcgtggtcactctggttatgcgtgttctgtgaatttgttgttaattgggaaatactggtattaaaacgttctgtatttttctcaagagccacagatatatgctggtccatgcacatacacgagtgcacatttatgcacacacacacatatacttaggcattcatgcctaataatacataaggtagaggtaggtagtctggctaagttaatgtagaatttttgctaaaaataatgttcttgtattattttccttcagacttgttcacaggggacacctgcaggtcttctaagtgctattaattcttacacaaaaagggcattccagttaatatggtttgtcaggaagaaatacttattaaaatgtcttggaataaatggaacacaaatgtttgaaaaggcccatttcacagcttttattcaagttataaaatgggaattacttcaggtgtaaataattcatcccaataaatttgtttcatttggtgtctatcttcctgaccgcctgtgaatatgagattttatttttggagccctgtgttgttaaccacttgttagtttaacacctctcatgaatcagagttctgaccctcaagggtccagacctctaagtcctttttcactgaagtgtttgtgcttttctataggcagtcttccaaacagaagaaggccattcaaactgctatccgcaaaaataaagaggcaaacgcagtgctggctcggctgaacagtgagctccagcagcagctcaaggtaaggaatgagtcccagatttggatgaccaggcttttccctggcttttaaaaagcttttttttaatttaataggcatataataattgtacatatttatagggtggggtacatagtgatgtctccatacctatcatgtacagtgatctgatgtgtccattggctgaccatttagttccatccctgttgataagacttgcctcttcgttctcaaaccctttttggaaggtggagaattactgtatttaagtttcatgggttggttcttgcatagtcagaggaagactagtgactttaatatgtaggcttcatattgtgtatgagttaaaaggaaagacaatctattacgaaggctgtttgaagcattctttattatccaaagcttctgggtaagcccttaattatttacatcctctctgaaagaggatgtaaatacttatttcagtagaaggaagtcaccttggtactatcaaagcccagcccctcctctggtgccttgcaaatggttccatttcaccttctcaatgacatcacccctgtttctcttcatcgttactctcccctgtgttagtttctcggggctgctataacaaaatactacaaatgtggtggcttaagataaccaaaaatgattctctcacagctctggaggctagaactctgaaatcaagatattggcagagctatgatctctttgaaggctctagaagatgatccttccttacctcttcccagcttctgatgttgctggcagccctgggcattccttggcttgtagctgcgtcactccaatctctgcctctgttgtcacatggccttcttcctgtatctctctgtgtctgtgtccaaatttctcttcttattgtatcctcttataaggacaccaatcattggattaggacccaccctaatctagcatgacctcatcttaacttgattacatctgcaaagaacctatttgcatataaggtcacatttacagatactgggggttaggacttaaacatatattttgagaggacatgattctacccactatatcccccagttctctactggatcattcgccatccacatgtaaatatgctccagtattgtccattacacttggccaattactgcctcatttctttggtccccttcacagcaaagtttcttaggagtggttttattcattatctttactttcaaaccagtaattttctcttccttccacttcagttggcttcgtcctcctccactcacacccgtcttgtggctaaatccaatagggctgttttaatattattatttttttttcagaagaattctacacaattgatcatttcctcctctgaaatggcttttataactggtttttgacataccatactctcctggttttccttctgcttcactggtgcttcccattttcattctctgctgtctcttccttccctgacttaacttttataccccaaccccatttgccccaatattttagtatgaaaattttcaaacatacaggaaagttgaaagaatcataagtgactgcttgtatagacatcacttcagttctacaataacattttactatacttatttttaatcacatatctacccatttatccttgtgtccatcagttcatcttatttttgacatattttcaaataaattgcagatatctgtatactttccctgaatattttagcatgcgtataattagctagagttcaatatatttttacagttttttcttatgatgtaaaatgtttatacaaaatgcatgcacaaatattattattattattattattattattattattattattattattattatttgagatggagtctcgctctgtcgcccacgctggagtgcggtggcgtgatctctgctcactgcaagctccgcctcctgggttcacaccattcttctggcttagcctcctgagtagctgggactacaggcgcctgccaccacgcccggccaactttttgtatttttagtagaggtggggtttcactgtgttagccaggttggtctcgatttcctgaccttgtgatctgcccgcctaggtctcccagagtgctgggattacaggcgtgagccaccgcgccagcgcacgcacaaaccttaagtgtacatttgctgagtttgtaacaagtacatgtacttacggaatccaaacccccaaaaagatagagaatattaccatcaccccaggaagctccctcatgctttttcctagtcaattcctgccctacccacacagaggcaatcactattctaatttttataccatagttttgcctgttctataactttatataagcggtgtcttacaacttatacttcttgtaaagcttctttcactaagtattatgtttttgagattcatttatattgttgtgtgtatcagtaattcattcatttttattgatgagtagtatcccattgggtgaatatgttacagtttggttatcaattctattgacagacacctgagcggtttccagtttttggcaatttggaataaaactgcattttttaataagtctctgtatggaaatatgttctcatttctcttggattgggattcgtaggtatcatggtaagtgtatgtgattagtttctgagaaactgctagatcattttccaaggtggttgtagcaatctgtactcctaccactaatgtatgagagttccaattgttccgcgtctttgccaacatttggtgttatgattcttattaattttagctagccctgtagtgatatagtttttatcatctccttgctgactaattatgttgtccacttttctttgtgattatttacctttcatatcttactttatgaaatatcttttcaaatgttatttttctccaaagtagtctatagatttattacaaaaccaataaaaatcccagcaggattttttgtgagtatagacaagctaatcccaaaacttatatgtaaaggccaaggagctggaattgcttaaacaaatttgaaaaggaagaacaaagttggaggaatcactttactgtcaagctccagtaatcaagatgctgatgcacaggtcagtggaataggatacagagtcctgaaatagaccacatgaaaacagccatttgatctttgacaaaggtgcaaaatcgattcaatgagaaataatagttttcaacaaattgttttataacaatttgtcatttgcatttaaaaaaataaccttgatctaagcctcacatctatacagagattaacttgaaatgagtcatagatgtaaatgtaaaacatagagctataaaatttttagaagaaaacagaaaaatcttcatgatctggagttagaaataacaccaaaagcacaatctataacagagaaaaactaaaaaaattggacttcatcaaaattaaaaccttttattttgccaagcacagttaagaaaattaagagacaagctgctgagtgggagaaagtatttgcaaaacacgtatttgataaaagacttatatctcaattatataaagaactcttaaaactcaataataagaactctcaaaaccaaagcatctcaatttaaaaatgggcaaaggatttgaacagacacttcactaaagaatatataaagatggcaaataagtacatgagaagatattcaacatcattagccatttgggaaatgcaaatttaaaccacaattacataccactatacacatactagaattgctaaaacaaaaaatgtgacatcaccaagtgctggcaattagaactctcatttattggtggtgggaatgcagaatggtaccaccactctgaaaaatcgttcagcagtttcctatgaagttatacatacactaaccatgtgacccagctgtctctctaccttagtgaaatgaaaatttatgttcgctcaaaaatctatatatgaacttacatagcagttttattcatgatagcccaaacctggaaacaacacaaatgtccttcaaaagatgaatgaataaattgggatacattcatacaatggaatagtactcaacagagaaaagaaatgatacacaacttggatgaaactcagacattatgcagagtgagacaagccagtatcaaaaggttgtgtactgtatgattccttttatttgacattcttgaaaaggtaaaactatagtgatgtgaaacaaatcagtggctatcaggggttatgcatgagatgagagtttgtatgagtagtcccagggaacttttggggttggttgaactgtaatgtgtcttctttgtggtggtggttacacaaatctgtacactaaaagaaaaaaattgttttaccctatgataattttaaaaagttattttttaaatttcaaagttcattctgttttctaaaactttgtatgtgaacttgttttgttttgcattttgtttggttttggttttctcctctctccctctgctttggggtaggccagtttcatccattgttctctacatttggtgggcccttttggaaactgatattccccagttctgaagggttttttattttcatttttgttgtcgttgattatttcctcccccctgccctcacccccatttttttctcattctcccttactgatattcagacattggacttcttagcttagttctctaattttctcatattttctcttctgttttctttcttttctcttcctacattttcttctttatttttgtctatttctggaaacttaattatatattctaaatcttctgttgtttaataaccaataattttttgttctctgtttatttttgacggtatcctattcttgtttcattgttgtgatcttttttttaattatactttaagttctgggaaacatgtgcagaactcgttgtgatctttttttatggtcatttttctttcttcttcctgaatagtttgtgtttgttgtgttgtgttgtatgtgctttatcttagatgctttcctttgatatctgatggcccttctttgctcatatttaaaaggaagatgaaaacactgattagaagttcattgtacgttgtaaggcttgtcaactctgagcttcactgtctggcaatttggctcggctgtatagttggggaacccccaaagggagtatgattagctctttcctcttggtctggttggagtgtccagagtggagactgttttggtcacctacatggagggatagagttggttcagtggagcaagagggctgtaggtctcagcattccaggatattcattcactctccctatttctggcccagtatcttgtcctcaactgtgcttgtttcttgctaatccagatgctctctgttgtaccttttcaagaaataaaccttcagcattctgccctggtggcaggaatgatctggggatctaattgcttctgaaacagattttcagccaacacttattttagccaactcccatctccccttatgtactcccactttaataggtatctggtgttgccaatttgagtctttcaggaattctcctacgtaaaatcaagttggttcttatttttcttcatgttagcctgggactcagctttctttacttgatctgtatgagtggaaaagttctaagtctagtgaacagaagtctgaagaatcattgaaacagaactatagtcatagcccctcaattaattcccaggctaagccagtttatagatccagaacctcttgaatgatgaaggggcatctatgtctccttaaggaaggaccccactgtgcagccaaaaatttacactgcaaatctttctcctagcctttcctaagggggaccctgctgccatttaccagggtgactgtgcattagaggaagggaaataattagacttttggggaattaccagacactggctctgaactcacactaattccaggagatgcaaagtgtcactgtggcccatcagagttggggcttagggagatcaggtgatcaatggagttttagcttatgttcgtctcacagtggacccagtggactcccaaactcaccctatggttatttccctagctctggaatggcatgcttggaatagacatactcagcagctggcagaattcccacatttattttcctggatttcctaagtcatttaccattcaccagtttgccactcagctttcaaattttattgctatcatcttgtcccttttgttttccctgtcttgtgggtccgtgactttgaaaagttgctgtattgttttagtggtgctccaggagggagagagtgtggtacccctggtcagtcttccatctttacctgaaacctctatctatactgttttgctagatgatgttatatggtctcatggctttgaagaccatccataaactaatgaaacctaatttatgtctcaagccctacttctcctttcctctgtgctctagacttgcatatataacttcttactcaatgttttctccttagatatccaatacacatctcagataattaattgccaaccctctccttgaaatactcatttcttatctaatcttctcattctcaatatcactaccagccagctactttcttcatacaaaaatcccaggagtcatcctcagatttttcttctctcctacatcaactttatcagcaagtcctaccagttctagattcaagatttatctagaattcatccacttctcttcatcttcatggcttctaccctgacggaagccattttcatttctcacctgggtccctgcagtaacctcccagttgctcccctgcttccactctcatcctgctataatctactgtctacacagtagccagagtgaaaattttgaattttaagttgggtcatgttccttccctgattagaaacactcaatgccaggccgggtgcagtggcccacgcctgtaatcccagcactttgggaggccgaggtgggcagatcacgaggtcaggagatcgagaccatcctggctaacgtggtgaaaccccgtttctactaaaaatacagaaaattagccgggcgtggtggcgggcgcctgtagtcccagctacttgggaggctgaggcaggagaatggcgtgaacctgggaggcggagcttgcagtgagccgagatcgcgccattgcactccagcctgggcgacagagtgagactctgtctcagaaaaaaaaaaaaaaagaaagaaagaaaccctcaatgccatccccgctacatttccatactatttcctctgcccacaaggccctgtacgatctggctccttgcttaaatctctgacttcatttcctgccaatgtcttccttgttccatctactctggtcacacaggctttttgttcatcaaattcaccaaactcactcgctcctcagggcctttgcagttgcccttttgtctctgtgaatatccttccccccatatcttcatatggctcactcctcatttcattcaagtctttgctcaagtattgctaactctgagaagccttcccagggcactctctctcctttctcccatatccccctctgttactctctattatgttatcttatttccttctggaagtatcttgttcattaactttattatctttctcaagtcatttgaatataagccctattgctctgatctggcatattctttgctgataccatcacagctacagcattacctcacctgtaggagatagaaaccaagagacttccggctgggtggctaggagagcatgtgaataaatacttgtgaagttgtatactgactattagtatgctgattcttctgaatctcacaattcagcctttctacaggattctttcccaccttgactgattctacttgaatacctttatgtgtcccctctcttcctgccaaaaaaatccgttttaggcccgaaagtttgaattcccaaagagcagattgctcagcctcttttctgcctttcacccagatgttgtaccttacaccatatgttgtgcagaaacttggatgagactttggtggaggggcaactagcgtacctttttggccctcagacctaactgagtatggtgcgggattacgagccagagattgcaactagaaatttaagtcctgttggctcactgctcagtattgggagtctgtttttgctttctgctttctcctagtcttttaatttttaatgactctgtctaccagctactgatcttgtcaaaacaggctaaaactagggcagggtggtagaggggagtaggtcagtttcatttcatcacgttcagaaaggagttgagagattacaaattgtgaagccccttttgtctggtcaccagcattaaatctgatacctcccagtcctcctgttcttgagttatacagcacttgtatttgtgggtccagttataagtttccttttaaatctgatgaagtagggatgaattcaagaaatgacccctttgcttttttgtttttcttgtgttttgtacaactcaggaggttcatcaagaacgaattgcattggaaaaccaattggaacaacttcgtccggtcactgtgttgtga

SEQ ID NO: 5 - DNA, 1913 bp, Homo sapiens
gtctgcgcctgcgcgcaagagaggcggggccagcgctcggcatggcggagccagatctggagtgcgagcagatccgtctgaagtgtattcgtaaggagggcttcttcacggtgcctccggaacacagggtgagccaccgcccccagcctggcctggcatttctttgagttcaggaagtgtgacaaggatttggacacccagaaataagcgtgtcgagaagagcacaagcagaggatctgggacgatgccggagtgtgaaggagtttgagaagctgaaccgcattggagagggtacctacggcattgtgtatcgggcccgggacacccagacagatgagattgtcgcactgaagaaggtgcggatggacaaggagaaggatggcatccccatcagcagcttgcgggagatcacgctgctgctccgcctgcgtcatccgaacatcgtggagctgaaggaggtggttgtggggaaccacctggagagcatcttcctggtgatgggttactgtgagcaggacctggccagcctcctggagaatatgccaacacccttctcggaggctcaggtcaagtgcatcgtgctgcaggtgctccggggcctccagtatctgcacaggaacttcattatccacagggacctgaaggtttccaacttgctcatgaccgacaagggttgtgtgaagacagcggatttcggcctggcccgggcctatggtgtcccagtaaagccaatgacccccaaggtggtcactctctggtaccgagcccctgaactgctgttgggaaccaccacgcagaccaccagcatcgacatgtgggctgtgggctgcatactggccgagctgctggcgcacaggcctcttctccccggcacttccgagatccaccagatcgacttgatcgtgcagctgctgggcacgcccagtgagaacatctggccgggcttttccaagctgccactggtcggccagtacagcctccggaagcagccctacaacaacctgaagcacaagttcccatggctgtcggaggccgggctgcgcctgctgcacttcctgttcatgtacgaccctaagaaaagggcgacggccggggactgcctggagagctcctatttcaaggagaagcccctaccctgtgagccggagctcatgccgacctttccccaccaccgcaacaagcgggccgccccagccacctccgagggccagagcaagcgctgtaaaccctgacggtgggcctggcacacgcctgtattcccacaccaggtcttccgatcagtggtgtctgtgaagggtgccgcgagccaggctgaccaggcgcccgggatccagctcatccccttggctgggaacatcctccactgacttcctcccactgtctgccctgaacccactgctgcccccagaaaaaggccgggtgacaccggggggctcccagcccgtgcaccctggaagggcaggtctggcggctccatccgtggctgcaggggtctcatgtggtcctcctcgctatgttggaaatgtgcaaccactgcttcttgggaggagtggtgggtgcagtccccccgctgtctttgagttgtggtggacgctggcctgggatgagagggcccagaagaccttcgtatcccctctcagtcgcccggggctgtcccgtgcatgggttggctgtggggaccccaggtgggcctggcaggactccagatgaggacaagagggacaaggtatggggtgggagccacaattgaggataccccgagactaccaggagagccctgggctggaggctgagctgcatccctgctccccacatggaggacccaacaggaggccgtggctctgatgctgagcgaagctataggctcttgttggataaaagcttttttaacagaaaaaaaaaaaaaaaaaaaa

SEQ ID NO: 6 - DNA, 1633 bp, Homo sapiens
gtctgcgcctgcgcgcaagagaggcggggccagcgctcggcatggcggagccagatctggagtgcgagcagatccgtctgaagtgtattcctgggacgatgccggagtgtgaaggagtttgagaagctgaaccgcattggagagggtacctacggcattgtgtatcgggcccgggacacccagacagatgagattgtcgcactgaagaaggtgcggatggacaaggagaaggatggcatccccatcagcagcttgcgggagatcacgctgctgctccgcctgcgtcatccgaacatcgtggagctgaaggaggtggttgtggggaaccacctggagagcatcttcctggtgatgggttactgtgagcaggacctggccagcctcctggagaatatgccaacacccttctcggaggctcaggtcaagtgcatcgtgctgcaggtgctccggggcctccagtatctgcacaggaacttcattatccacagggacctgaaggtttccaacttgctcatgaccgacaagggttgtgtgaagacagcggatttcggcctggcccgggcctatggtgtcccagtaaagccaatgacccccaaggtggtcactctctggtaccgagcccctgaactgctgttgggaaccaccacgcagaccaccagcatcgacatgtgggctgtgggctgcatactggccgagctgctggcgcacaggcctcttctccccggcacttccgagatccaccagatcgacttgatcgtgcagctgctgggcacgcccagtgagaacatctggccgggcttttccaagctgccactggtcggccagtacagcctccggaagcagccctacaacaacctgaagcacaagttcccatggctgtcggaggccgggctgcgcctgctgcacttcctgttcatgtacgaccctaagaaaagggcgacggccggggactgcctggagagctcctatttcaaggagaagcccctacgtcttccgatcagtggtgtctgtgaagggtgccgcgagccaggctgaccaggcgcccgggatccagctcatccccttggctgggaacatcctccactgacttcctcccactgtctgccctgaacccactgctgcccccagaaaaaggccgggtgacaccggggggctcccagcccgtgcaccctggaagggcaggtctggcggctccatccgtggctgcaggggtctcatgtggtcctcctcgctatgttggaaatgtgcaaccactgcttcttgggaggagtggtgggtgcagtccccccgctgtctttgagttgtggtggacgctggcctgggatgagagggcccagaagaccttcgtatcccctctcagtcgcccggggctgtcccgtgcatgggttggctgtggggaccccaggtgggcctggcaggactccagatgaggacaagagggacaaggtatggggtgggagccacaattgaggataccccgagactaccaggagagccctgggctggaggctgagctgcatccctgctccccacatggaggacccaacaggaggccgtggctctgatgctgagcgaagctataggctcttgttggataaaagcttttttaacagaaaaaaaaaaaaaaaaaaaa

SEQ ID NO: 7 - DNA, 1803 bp, Homo sapiens
gtctgcgcctgcgcgcaagagaggcggggccagcgctcggcatggcggagccagatctggagtgcgagcagatccgtctgaagtgtattcgtaaggagggcttcttcacggtgcctccggaacacaggatcgggcccgggacacccagacagatgagattgtcgcactgaagaaggtgcggatggacaaggagaaggatggcatccccatcagcagcttgcgggagatcacgctgctgctccgcctgcgtcatccgaacatcgtggagctgaaggaggtggttgtggggaaccacctggagagcatcttcctggtgatgggttactgtgagcaggacctggccagcctcctggagaatatgccaacacccttctcggaggctcaggtcaagtgcatcgtgctgcaggtgctccggggcctccagtatctgcacaggaacttcattatccacagggacctgaaggtttccaacttgctcatgaccgacaagggttgtgtgaagacaggtgggtgcaacttgggccaggccctgtccctagatggcacttggtgacacacactcccctctctgctgcagcggatttcggcctggcccgggcctatggtgtcccagtaaagccaatgacccccaaggtggtcactctctggtaccgagcccctgaactgctgttgggaaccaccacgcagaccaccagcatcgacatgtgggctgtgggctgcatactggccgagctgctggcgcacaggcctcttctccccggcacttccgagatccaccagatcgacttgatcgtgcagctgctgggcacgcccagtgagaacatctggccgggcttttccaagctgccactggtcggccagtacagcctccggaagcagccctacaacaacctgaagcacaagttcccatggctgtcggaggccgggctgcgcctgctgcacttcctgttcatgtacgaccctaagaaaagggcgacggccggggactgcctggagagctcctatttcaaggagaagcccctaccctgtgagccggagctcatgccgacctttccccaccaccgcaacaagcgggccgccccagccacctccgagggccagagcaagcgctgtaaaccctgacggtgggcctggcacacgcctgtattcccacaccaggtcttccgatcagtggtgtctgtgaagggtgccgcgagccaggctgaccaggcgcccgggatccagctcatccccttggctgggaacatcctccactgacttcctcccactgtctgccctgaacccactgctgcccccagaaaaaggccgggtgacaccggggggctcccagcccgtgcaccctggaagggcaggtctggcggctccatccgtggctgcaggggtctcatgtggtcctcctcgctatgttggaaatgtgcaaccactgcttcttgggaggagtggtgggtgcagtccccccgctgtctttgagttgtggtggacgctggcctgggatgagagggcccagaagaccttcgtatcccctctcagtcgcccggggctgtcccgtgcatgggttggctgtggggaccccaggtgggcctggcaggactccagatgaggacaagagggacaaggtatggggtgggagccacaattgaggataccccgagactaccaggagagccctgggctggaggctgagctgcatccctgctccccacatggaggacccaacaggaggccgtggctctgatgctgagcgaagctataggctcttgttggataaaagcttttttaacagaaaaaaaaaaaaaaaaaaaa

SEQ ID NO: 8 - DNA, 5676 bp, Homo sapiens
atgacatcctctggagcccagaaaaaagttaaaagaactctgccaaatccacctcctgaggagatttccacaggaactcaatccacattcagcacaatgggcacagtttccaggagaaggatctgcagaaccaacacaatggcacgagccaagattctccaggacatagacagagagcttgatcttgtggaaagggagtctgcaaaacttcgaaagaaacaagcagagcttgatgaagaagaaaaggagattgatgctaagctacgatacctggaaatgggaattaacaggaggaaagaggccctattaaaggagagagaaaagagagaacgagcctacctccagggagtagctgaggatcgtgattacatgtctgacagtgaagtgagtagcacaagaccaacccgaatagaaagtcagcatggcattgagcgaccaagaactgctccccaaactgaattcagccagtttataccaccacaaacccaaacagaatctcaactagttcctccgacaagtccttacacacaataccagtactcttcccctgctcttcctacccaagcacccacctcatacactcaacagtctcattttgagcaacaaactttgtaccatcagcaagtttcaccttatcagactcagccaacattccaagctgtggcaacaatgtccttcacacctcaagttcaacctacaccaaccccacagccttcttatcagttaccttcacagatgatggtgatacaacagaagccacggcaaactacattatatttggagcccaagataacctcaaactatgaagtgattcgcaaccaaccccttatgatagcacctgtttctacggataacacatttgctgtttcccatcttggtagtaagtacaatagtttagacttgagaataggtttggaggaaagaagtagcatggcaagcagtccaatatcaagcatatctgcagattctttctatgcagatattgatcaccatactccacgaaattatgtcctaattgacgacattggagagatcaccaaaggaacagcggcattaagcaccgcatttagccttcatgaaaaggatctgtcaaaaacagaccgtctccttcgaaccactgagacacgccggtctcaagaagtgacagatttcctagcacctttacagtcttcctctagattgcatagttatgtgaaggcggaggaagacccaatggaggatccttacgagttaaagcttctgaaacatcagattaaacaggaatttcgtagagggacagagagcttagatcaccttgctggtctttctcattattaccatgctgatactagctacagacattttccaaaatctgagaagtatagcatcagtagactcacacttgaaaaacaagcagcaaaacaactgccagcagccatactttatcaaaagcagtcaaagcataagaaatcactaattgaccctaaaatgtcaaaattttcacctattcaagaaagtagagaccttgaacctgattattcaagctatatgacttctagcacttcatctattggtggcatttcctccagggcaaggctccttcaagatgacatcacttttggcctcagaaaaaatattacagaccaacaaaaatttatgggatcttctcttggcacaggactgggcacattaggaaataccatacgctcagctctgcaggatgaagcggataagccatacagtagtggcagcaggtccagaccttcctccagaccttcctctgtctatgggcttgatttatcaattaaaagggattcttctagctcttccctaagactgaaagctcaagaggctgaagctctagatgtttcctttagtcatgcatcatcctctgccagaactaagccgaccagtttgccaattagtcaaagtagaggaagaataccaattgtggcccagaattctgaagaagaaagcccactcagtcctgttggccagccaatgggaatggccagggctgcagctggacccctgccaccaatatctgcagacaccagggatcagtttggatcaagccactcattgcctgaagttcagcaacacatgagggaagaatcacggactcgaggctatgaccgtgacatagcattcatcatggatgacttccaacatgccatgtcagacagtgaagcctatcatctgcgtcgtgaggaaacagattggtttgataaacccagggagtctcgtttggaaaatggacatggtctggaccgaaaactgccggaaagattggtccactctagaccactcagtcaacatcaagagcaaattatacagatgaacgggaaaactatgcactacatctttcctcacgcaaggataaaaataacaagagactcaaaggatcacacagtttcaggtaatggattaggaattagaattgtgggtggtaaagaaatcccgggacatagtggagaaattggagcctatattgccaagattcttcctgggggaagtgcggaacagacggggaagcttatggaagggatgcaagtattggaatggaatggaattcccttgacttctaaaacatatgaagaagttcagagtatcattagtcagcaaagtggggaagcagaaatatgtgtaagactggacctcaatatgctatcagattctgaaaattcccagcatctggaacttcatgagccaccaaaagctgtggataaggcgaaatccccaggggttgatcctaagcagttggcagcagaactccagaaggtttcactacagcagtcaccgctggttctgtcatcagttgttgaaaaaggatctcatgttcattcaggtcctacatcagcaggatccagttccgttcccagccctgggcaaccagggtccccctcagtgagcaaaaagaagcacggcagcagcaagcctaccgatggaacaaaggttgtctctcatccaattacaggagaaattcagcttcaaattaactatgatcttggaaatctcataatacatattctccaagcaagaaatcttgttcctcgagacaacaatggttattctgacccttttgtgaaagtgtaccttcttccagggagaggtcaagtcatggttgtccagaatgcaagtgctgagtacaagagaaggactaaacatgtccagaaaagtcttaatcctgagtggaatcaaacagtaatttataaaagtatttccatggaacagctcaagaagaaaacactggaggtgacagtttgggattatgatagattttcatccaacgacttccttggggaggtattgattgatttatctagcacatctcacctcgataacactccaaggtggtatcctctcaaagaacagactgaaagcattgatcatggcaagtctcattccagtcagagcagccagcagtccccaaagccatctgttatcaaaagcagaagccatggtatcttccctgacccatcaaaggacatgcaggttcccaccattgagaaatcccatagtagtcctggtagctcaaaatcatcatcagaaggccatctccgttctcatggaccatctcgcagtcaaagcaaaaccagcgtcactcagacccacctggaagatgcaggggctgccatagctgctgccgaagctgccgtgcaacaactccgcattcaaccaagtaaaagacgcaaataaattcctcagcatggcagcttaatgttcatctgttgcctttctttcctgctgtcctttcctgtttgctttcagttttcaacatcctctgctcaccctgttctctgtccctttgtctgtgtaagaacgatataaatacattaatatgctctttcttatttagattttttttatttacatagactgaaataaaactggctgtttctcctttgtttccaccatccatccaacctggctcatagcatttgatacagtgtctgtgatgtttggaagcaaagcaatgttgtgtgtcctttttgtttgcgcttaaatatcttttagaatacagaaattataagcacaagtggctgccagttttccaggacttataccaaaaaaaaaaaagtgcacacatataagtatttagagcagatttgcaattagattcttgtatctgaaaacactcaaaaagtctaggcagaagataatgcaaccaacagtcaacttctagaaccttggaggaaaagccatttcaagacagtgctttaaaacactaacaaattttgcttctgaaatatggtagctttccatgtgcaaaaaattgtagtcttctgaaaaatctgtgaagaaaatcttatttcttacattctcaaaaaactacattaaattaatatatgtataagcatatgtgataaggcaatgcaacctcactgaggagcacaattgggtccattctgttggatcacactttgtatgtgatgacagattttacagatattttttctaaccattggaaatcaagatatactatgtctggtagctataagtcaatcaaagtataacaattgacctatcttaactgctgtattttcatttcatttgtgaaaatttagtcgattgatataattatataaaaacttaatatgtgcaaatatttcacaaatgtaggtaccctgttacttctaaaaggcattagccaggcaatggagatagatcattgttctctccatctccctagtcatcattttcaaagaaacagccagttttaaacccctttagtgctgtgcatgtggtgtcattttggcatttgaaaacacaacctatttaaatagagcaaaagagcacttctgtttgcatgaataacatttaagctggttccatctgaggatacatactctgggtttccatttcacccacactgccacagcagcacataaaagcggtcagtctaatcatgccaggaagcagcacagacacagcatagcaggagtcctccccattcaaagaactcagtctgataatctgcctccaccagccaatggcaaccaagaccaaagccagctagccctcaggaaggtgatgtctgatggaccagtcaagccagaaggaggtgagcagaaaggccctgttcaaagcacacagcaagaacatccccaaatttaaagctctcatctttaatttttagagattgtctgataaaatatgtttatccactttttaatgtgcttttgtgggcatggcatttcaggacttcatcatcaccatgtaagtcccaagatcagtcccgtaatatattgactacagtgatttgtatttttctatgcactgggcatcttttgacttttgttgggaaatagattaacaatattcatattgcagaatggaatgcatgctactaacctaatctgttcaagcatgactataaatatgtttcattgtgataaaagtttaaattgctcacagttcaagttagcctaccagttggaatgtggatcagtgttttttgcctattatttcaagtgtaacttttaaaaatttagtggattttgaaaattcttagaggaaagtaaaggaaaaattgttaatgcactcatttacctttacatggtgaaagttctctcttgatcctacaaacagacattttccactcgtgtttccatagttgttaagtgtatcagatgtgttgggcatgtgaatctccaagtgcctgtgtaataaataaagtatctttatttcattcat

SEQ ID NO: 9 - DNA, 3144 bp, Homo sapiens
gcgtgctgtgcggcgcggtctcagggaaggtggggctatggcagctgctagggaccctccggaagtatcgctgcgagaagccacccagcgaaaattgcggaggttttccgagctaagaggcaaacttgtagcacgtggagaattctgggacatagttgcaataacagcggctgatgaaaaacaggaacttgcttacaaccaacagctgtcagaaaagctgaaaagaaaggagttaccccttggagttcaatatcacgtttttgtggatcctgctggagccaaaattggaaatggaggatcaacactttgtgcccttcaatgtttggaaaagctatatggagataaatggaattcttttaccatcttattaattcactctggtggctacagtcaacgacttccaaatgcaagtgctctgggaaaaattttcactgctttacctcttggtaaccccatttatcagatgctagaattaaagctagccatgtacattgatttccccttaaatatgaatcctggaattctggttacctgtgcagatgatattgaactttatagtattggagaatttgagtttattaggtttgacaaacctggctttactgctttagctcatccttctagtttgacgataggtaccacacatggagtatttgtcttagatccttttgatgatttaaaacatagagaccttgaatacaggtcttgccatcgtttccttcataagcccagcatagaaaagatgtatcagtttaatgctgtgtgtagacctggaaatttttgtcaacaggactttgctgggggtgacattgccgatcttaaattagactctgactatgtctacacagatagcctattttatatggatcataaatcagcaaaaatgttacttgctttttatgaaaaaataggcacactgagctgtgaaatagatgcctatggtgactttctgcaggctttgggacctggagcaactgtggagtacaccagaaacacatcacatgtcattaaagaagagtcagagttggtagaaatgaggcagagaatatttcatcttcttaaaggaacatcactaaatgttgttgttcttaataactccaaattttatcacattggaacaaccgaagaatatttgttttactttacctcagataacagtttaaagtcagagctcggcttacagtccataacttttagtatctttccagatataccagaatgctctggcaaaacatcctgtatcattcaaagcatactggattcaagatgttctgtggcacctggctcagttgtggagtattccagattggggcctgatgtttcagttggggaaaactgcattattagtggttcttacatcctaacaaaagctgccctccccgcacattcttttgtatgttccttaagcttaaagatgaatagatgcttaaagtatgcaactatggcatttggagtgcaagacaacttgaaaaagagtgtgaaaacattgtcagatataaagttacttcaattctttggagtctgtttcctgtcatgcttagatgtttggaatcttaaagttacagaggaactgttctctggtaacaagacatgtctgagtttgtggactgcacgcattttcccagtttgttcttctttgagtgactcagttataacatccctaaagatgttaaatgctgttaagaacaagtcagcattcagcctgaatagctataagttgctgtccattgaagaaatgcttatctacaaagatgtagaagatatgataacttacagggaacaaatttttctagaaatcagtttaaaaagcagtttgatgtagagatattttaaatattgtacactttgcctttttgagtaacattccagagataggtatttttggtaggctgtttcactgaactcagttaatgaaaactgtattaacataattgttgtagcataatattaatagtgcaaaagtacatataagtcattttgatgaaaaatattccaagactaagttgagaaaagagatactattttggatgtgtatcagtatttttgtttttaataatgattgatttgtggagcattgttttttcacataattagttttaaaggtaattttctaagcatacctttggaatttttccatcttttttgaggcttttggtccagtgaagttctaagtattcactggcacttctctcctcaactgtaattctatttttaataataaaaatggcatactgtagggtcttcagagtagtgtaggaatactgtagaaatactttttcagaaacgaatccatagctgacaaattcactcagtgcccaatatattgtgattattttcgttgataaagaactagatacaaagacctctgaaattgatgataaaatttgtatctcattaattttatcaaaatgaaactaaaagtacatatgtattatacacttgaacatgtgtttgtatatctttaaaattttcctttatgtccattccataggaagacacacatatgcacacaaaactcagttatctgtgggggaagtggtagtaataattgagattcatcaataatcatataatttcactatagacattacttgcattatctcctatcagtccttctcacaaaacttcaattaccagatgaactgactttagttttcatcttattttttgtccacatgctggtgatgctgagaaacaataattggcccaaatgcagacatcaagaagcaggcaggaaaatggaaaaactgagataatacacaggtgataaacagtttcgagaaaataaaaattggctagaatctcaagttatgtgtttctatattggtataagcatataagtgaaaagtcttataagtgtaatagagaaaagatttgtcagtgtgtttttttaaatgaaataactagtctgtgctactttatgtcaatataaaaattggtaaactagaagtaacttgtccacaaccctcagttatgatacttatgtgcgtgtttttttttccaaagtttttcccaaggagaagatacaaatatatggtagctattgtttaaaaatgattgatttacttgcagatttttcagaggatgttatgtctttgtcattcattaaatgttcaaaattgtagttttaaaaaaaaaaaaaaa

SEQ ID NO: 10 - DNA, 3001 bp, Homo sapiens
aatcttataacttgaagaactgccctggagaaaggaagaaacttataataaatgggaaattataaatctagaccaacccaaacttgtactgatgaatggaagaaaaaagtcagtgaatcatatgttatcacaatagaaagattagaagatgacctgcagatcaaggaaaaagaactgacagaactaaggaatatatttggctctgatgaagccttcagtaaagtcaatttaaattaccgcactgaaaatgggctgtctctacttcatttatgttgcatttgtggaggcaagaaatcacatattcgaactcttatgttgaaagggctccgcccatctcgactgacaagaaatggatttacagccttgcatttagcagtttacaaggataatgcagaattgatcacttctctgcttcacagtggagctgatatacagcaggttggatacggtggcctcactgccctccatattgctacaatagctggccacctagaggctgctgatgtgctgttgcaacatggagctaatgtcaatattcaagatgcagtttttttcactccattgcatattgcagcgtactatggacatgaacaggtaactcgccttcttttgaaatttggtgctgatgtaaatgtaagtggtgaagttggagatagacccctccacctagcatctgcaaaaggattcttgaatattgcaaaactcttgatggaagaaggcagcaaagcagatgtgaatgctcaagataatgaagaccatgtcccactccatttctgttctcgatttggacaccatgatatagttaagtatctgctgcaaagtgatttggaagttcaacctcatgttgttaatatctatggagatacccccttacacctggcatgctacaatggcaaatttgaagttgccaaggaaatcatccaaatatcaggaacagaaagtctgactaaggaaaacatcttcagtgaaacagcttttcatagtgcttgtacctatggcaagagcattgacctagtcaaatttcttcttgatcagaatgtcataaacatcaaccaccaaggaagggatgggcacactggattacactctgcttgctaccacggtcacattcgcctggttcagttcttactggataatggagctgatatgaatctagtggcttgtgatcccagcaggtctagtggtgaaaaagatgagcagacatgtttgatgtgggcttatgaaaaagggcatgatgccattgtcacactcctgaagcattataagagaccacaagatgaattgccctgtaatgaatattctcagcctggaggagatggctcctatgtgtctgttccatcacccttggggaagattaaaagcatgacaaaagagaaggcagatattctcctcctaagagctggattgccttcacatttccatcttcagctctcagaaattgagttccatgagattattggctcaggttcttttgggaaagtatataaaggacgatgcagaaataaaatagtggctataaaacgttatcgagccaatacctactgctccaagtcagatgtggatatgttttgccgagaggtgtccattctctgccagctcaatcatccctgcgtaattcagtttgtgggtgcttgcttgaatgatcccagccagtttgccattgtcactcaatacatatcagggggttctctgttctccctccttcatgagcagaagaggattcttgatttgcagtctaaattaattattgcagtagatgttgccaaaggcatggagtaccttcacaacctgacacagccaattatacatcgtgacttgaacagtcacaatattcttctctatgaggatgggcatgctgtggtggcagattttggagaatcaagatttctacagtctctggatgaagacaacatgacaaaacaacctgggaacctccgttggatggctcctgaggtgttcacgcagtgcactcggtacaccatcaaagcagatgtcttcagctatgctctgtgtctgtgggaaattctcactggcgaaattccattcgctcatctcaagccagcggctgcggcagcagacatggcttaccaccacatcagacctcccattggctattccattcccaagcccatatcatctctgctgatacgagggtggaacgcatgtcctgaaggaagacccgaattttctgaagttgtcatgaagttagaagagtgtctctgcaacattgagctgatgtctcctgcatcaagtaacagcagtgggtctctctcaccttcttcttcttctgattgcctggtgaaccggggaggacctggccggagtcatgtggcagcattaagaagtcgtttcgaattggaatatgctctaaatgcaaggtcctatgctgctttgtcccaaagtgctggacaatattcctctcaaggtctgtctttggaggagatgaaaagaagtcttcaatacacacccattgacaaatatggctatgtatccgatcccatgagctcaatgcattttcattcttgccgaaatagtagcagctttgaggacagcagctgacagcattcggcgtatacctaaggagagttttttccccgaactgacagcaacgattccaaccacggcaagctggcttccaactataacattttactctcaaaggtctccttaaattgggcttgtttttacttgtcctatttaattccccactattagcaggctttggatttgtgcctaaggaataatatgcaaaagaaccaagacagaatgtatatgaagaattgtttttaattttgtaaattaaaaaaaaatttagatcgttacttggaaatggagcctaagtctgtggtggacagataataattatgttttcctgggctgaattatgtagacttgtgtttgacagctatgggtttatttcttagaacattgttcattttcttttctcattatgttacttctagtgttcacctctgtgattaaagattctttggtgaaatag

SEQ ID NO: 11 - DNA, 2285 bp, Homo sapiens
ccgggaggaagcggccgcgcggcagctgcggggcgtgggggtggtggtggcggcggcggtggtggcggcggcggcggcggcggcagctgaggccgaggaggcggtggctgtggcggacgcagcagcaccccagctagggatagggctccgccgcgcccccttgctggccccatggaggcggcagcggcggcggcggcggcggcagcggcagcggcagcggcgggcgggggctgtggctccgggccgccgccgctgctgctgagcgagggcgagcagcagtgctactccgagctcttcgcgcgctgtgccggcgccgcgggcgggggccccgggtctgggccccccgaggccgccagagtcgcccccggcacggccactgcggccgccggccccgtggctgacctgtttcgggcatcgcagctgcccgccgagacgctgcaccagatcacagaactgtgtggtgcaaagcgggttggttattttggtccaacacagttttacattgccctgaaattaattgctgcagcacaatctggcctcccggtacggatagagagtattaaatgtgaattgcctctgcctcgctttatgatgtcaaagaatgatggtgagatacgatttgggaacccagctgagctgcatggaactaaggttcagattccatatttaactacagaaaaaaattccttcaaaagaatggacgatgaggataaacagcaggaaacacagtctcccacgatgtcacccctcgcctcccctccttcttccccgcctcattaccagagggtgcccttgagccatggctacagcaaactgcggagcagcgcagaacagatgcatccagcaccttatgaagctaggcagccccttgtccagcccgagggatcctcatcagggggcccaggaaccaagccccttcggcatcaggcttcccttatccggtccttttcagtggagagggaactacaggataacagcagttaccccgacgaaccctggaggataacagaagaacagcgcgagtactatgtcaatcagttccgatcccttcagccagacccaagctctttcatttcaggttctgtggccaagaacttcttcaccaaatcaaagctttccattccagaactctcctatatatgggagcttagtgatgctgactgtgatggagccctgaccctgcctgagttctgtgctgcgtttcatctcattgtggctcggaagaacggctacccattgcctgagggcctccctccaactctgcagccagaatacctgcaggcagcttttcctaagcccaaatgggactgtcaattatttgattcttattctgagtcactgccggcaaatcaacaacctcgtgacttgaatcggatggagaagacatctgttaaagacatggctgaccttcctgtccctaaccaggatgtaactagtgatgacaaacaagctttgaaaagtactatcaatgaagccttaccaaaggacgtgtctgaggatccagcaactcccaaggattccaacagtctcaaagcaagaccaagatccagatcttactctagcacctccatagaagaggccatgaaaaggggcgaggaccctcccaccccgccacctcggccacagaaaacccattccagagcctcctccttggatctgaataaagtcttccagcccagtgtgccagctaccaagtcaggattgttacccccaccacctgcgctccctccaagaccttgtccatcacagtctgaacaagtgtcggaggccgagttactcccacagctgagcagagccccatcccaggctgcagaaagtagtccagcaaagaaggatgtactgtattctcagccaccatcaaagcccattcgtaggaaattcagaccagaaaaccaagctacagaaaaccaagagccttccactgctgcaagtgggccagcttctgcggcaaccatgaaaccgcatccaacagtccaaaagcagtcttccaaacagaagaaggccattcaaactgctatccgcaaaaataaagaggcaaacgcagtgctggctcggctgaacagtgagctccagcagcagctcaaggaggttcatcaagaacgaattgcattggaaaaccaattggaacaacttcgtccggtcactgtgttgtgacccccccatggttcaagtgacagtgggtgaccttgtctgccaagatctttcttttgaatgttttgaacccaactacttgtcatagatgtttgactgtgtcaaaagctgtgagcagcaaaatataatccata

SEQ ID NO: 12 - protein, 331 aa, Homo sapiens
MGRCRSVKEFEKLNRIGEGTYGIVYRARDTQTDEIVALKKVRMDKEKDGIPISSLREITLLLRLRHPNIVELKEVVVGNHLESIFLVMGYCEQDLASLLENMPTPFSEAQVKCIVLQVLRGLQYLHRNFIIHRDLKVSNLLMTDKGCVKTADFGLARAYGVPVKPMTPKVVTLWYRAPELLLGTTTQTTSIDMWAVGCILAELLAHRPLLPGTSEIHQIDLIVQLLGTPSENIWPGFSKLPLVGQYSLRKQPYNNLKHKFPWLSEAGLRLLHFLFMYDPKKRATAGDCLESSYFKEKPLPCEPELMPTFPHHRNKRAAPATSEGQSKRCKP

SEQ ID NO: 13 - protein, 314 aa, Homo sapiens
MGRCRSVKEFEKLNRIGEGTYGIVYRARDTQTDEIVALKKVRMDKEKDGIPISSLREITLLLRLRHPNIVELKEVVVGNHLESIFLVMGYCEQDLASLLENMPTPFSEAQVKCIVLQVLRGLQYLHRNFIIHRDLKVSNLLMTDKGCVKTADFGLARAYGVPVKPMTPKVVTLWYRAPELLLGTTTQTTSIDMWAVGCILAELLAHRPLLPGTSEIHQIDLIVQLLGTPSENIWPGFSKLPLVGQYSLRKQPYNNLKHKFPWLSEAGLRLLHFLFMYDPKKRATAGDCLESSYFKEKPLRLPISGVCEGCREPG

SEQ ID NO: 14 - protein, 123 aa, Homo sapiens
MDKEKDGIPISSLREITLLLRLRHPNIVELKEVVVGNHLESIFLVMGYCEQDLASLLENMPTPFSEAQVKCIVLQVLRGLQYLHRNFIIHRDLKVSNLLMTDKGCVKTGGCNLGQALSLDGTW

SEQ ID NO: 15 - protein, 1225 aa, Homo sapiens
MTSSGAQKKVKRTLPNPPPEEISTGTQSTFSTMGTVSRRRICRTNTMARAKILQDIDRELDLVERESAKLRKKQAELDEEEKEIDAKLRYLEMGINRRKEALLKEREKRERAYLQGVAEDRDYMSDSEVSSTRPTRIESQHGIERPRTAPQTEFSQFIPPQTQTESQLVPPTSPYTQYQYSSPALPTQAPTSYTQQSHFEQQTLYHQQVSPYQTQPTFQAVATMSFTPQVQPTPTPQPSYQLPSQMMVIQQKPRQTTLYLEPKITSNYEVIRNQPLMIAPVSTDNTFAVSHLGSKYNSLDLRIGLEERSSMASSPISSISADSFYADIDHHTPRNYVLIDDIGEITKGTAALSTAFSLHEKDLSKTDRLLRTTETRRSQEVTDFLAPLQSSSRLHSYVKAEEDPMEDPYELKLLKHQIKQEFRRGTESLDHLAGLSHYYHADTSYRHFPKSEKYSISRLTLEKQAAKQLPAAILYQKQSKHKKSLIDPKMSKFSPIQESRDLEPDYSSYMTSSTSSIGGISSRARLLQDDITFGLRKNITDQQKFMGSSLGTGLGTLGNTIRSALQDEADKPYSSGSRSRPSSRPSSVYGLDLSIKRDSSSSSLRLKAQEAEALDVSFSHASSSARTKPTSLPISQSRGRIPIVAQNSEEESPLSPVGQPMGMARAAAGPLPPISADTRDQFGSSHSLPEVQQHMREESRTRGYDRDIAFIMDDFQHAMSDSEAYHLRREETDWFDKPRESRLENGHGLDRKLPERLVHSRPLSQHQEQIIQMNGKTMHYIFPHARIKITRDSKDHTVSGNGLGIRIVGGKEIPGHSGEIGAYIAKILPGGSAEQTGKLMEGMQVLEWNGIPLTSKTYEEVQSIISQQSGEAEICVRLDLNMLSDSENSQHLELHEPPKAVDKAKSPGVDPKQLAAELQKVSLQQSPLVLSSVVEKGSHVHSGPTSAGSSSVPSPGQPGSPSVSKKKHGSSKPTDGTKVVSHPITGEIQLQINYDLGNLIIHILQARNLVPRDNNGYSDPFVKVYLLPGRGQVMVVQNASAEYKRRTKHVQKSLNPEWNQTVIYKSISMEQLKKKTLEVTVWDYDRFSSNDFLGEVLIDLSSTSHLDNTPRWYPLKEQTESIDHGKSHSSQSSQQSPKPSVIKSRSHGIFPDPSKDMQVPTIEKSHSSPGSSKSSSEGHLRSHGPSRSQSKTSVTQTHLEDAGAAIAAAEAAVQQLRIQPSKRRK

SEQ ID NO: 16 - protein, 594 aa, Homo sapiens
MAAARDPPEVSLREATQRKLRRFSELRGKLVARGEFWDIVAITAADEKQELAYNQQLSEKLKRKELPLGVQYHVFVDPAGAKIGNGGSTLCALQCLEKLYGDKWNSFTILLIHSGGYSQRLPNASALGKIFTALPLGNPIYQMLELKLAMYIDFPLNMNPGILVTCADDIELYSIGEFEFIRFDKPGFTALAHPSSLTIGTTHGVFVLDPFDDLKHRDLEYRSCHRFLHKPSIEKMYQFNAVCRPGNFCQQDFAGGDIADLKLDSDYVYTDSLFYMDHKSAKMLLAFYEKIGTLSCEIDAYGDFLQALGPGATVEYTRNTSHVIKEESELVEMRQRIFHLLKGTSLNVVVLNNSKFYHIGTTEEYLFYFTSDNSLKSELGLQSITFSIFPDIPECSGKTSCIIQSILDSRCSVAPGSVVEYSRLGPDVSVGENCIISGSYILTKAALPAHSFVCSLSLKMNRCLKYATMAFGVQDNLKKSVKTLSDIKLLQFFGVCFLSCLDVWNLKVTEELFSGNKTCLSLWTARIFPVCSSLSDSVITSLKMLNAVKNKSAFSLNSYKLLSIEEMLIYKDVEDMITYREQIFLEISLKSSLM

SEQ ID NO: 17 - protein, 835 aa, Homo sapiens
MGNYKSRPTQTCTDEWKKKVSESYVITIERLEDDLQIKEKELTELRNIFGSDEAFSKVNLNYRTENGLSLLHLCCICGGKKSHIRTLMLKGLRPSRLTRNGFTALHLAVYKDNAELITSLLHSGADIQQVGYGGLTALHIATIAGHLEAADVLLQHGANVNIQDAVFFTPLHIAAYYGHEQVTRLLLKFGADVNVSGEVGDRPLHLASAKGFLNIAKLLMEEGSKADVNAQDNEDHVPLHFCSRFGHHDIVKYLLQSDLEVQPHVVNIYGDTPLHLACYNGKFEVAKEIIQISGTESLTKENIFSETAFHSACTYGKSIDLVKFLLDQNVININHQGRDGHTGLHSACYHGHIRLVQFLLDNGADMNLVACDPSRSSGEKDEQTCLMWAYEKGHDAIVTLLKHYKRPQDELPCNEYSQPGGDGSYVSVPSPLGKIKSMTKEKADILLLRAGLPSHFHLQLSEIEFHEIIGSGSFGKVYKGRCRNKIVAIKRYRANTYCSKSDVDMFCREVSILCQLNHPCVIQFVGACLNDPSQFAIVTQYISGGSLFSLLHEQKRILDLQSKLIIAVDVAKGMEYLHNLTQPIIHRDLNSHNILLYEDGHAVVADFGESRFLQSLDEDNMTKQPGNLRWMAPEVFTQCTRYTIKADVFSYALCLWEILTGEIPFAHLKPAAAAADMAYHHIRPPIGYSIPKPISSLLIRGWNACPEGRPEFSEVVMKLEECLCNIELMSPASSNSSGSLSPSSSSDCLVNRGGPGRSHVAALRSRFELEYALNARSYAALSQSAGQYSSQGLSLEEMKRSLQYTPIDKYGYVSDPMSSMHFHSCRNSSSFEDSS

SEQ ID NO: 18 - protein, 521 aa, Homo sapiens
MMSKNDGEIRFGNPAELHGTKVQIPYLTTEKNSFKRMDDEDKQQETQSPTMSPLASPPSSPPHYQRVPLSHGYSKLRSSAEQMHPAPYEARQPLVQPEGSSSGGPGTKPLRHQASLIRSFSVERELQDNSSYPDEPWRITEEQREYYVNQFRSLQPDPSSFISGSVAKNFFTKSKLSIPELSYIWELSDADCDGALTLPEFCAAFHLIVARKNGYPLPEGLPPTLQPEYLQAAFPKPKWDCQLFDSYSESLPANQQPRDLNRMEKTSVKDMADLPVPNQDVTSDDKQALKSTINEALPKDVSEDPATPKDSNSLKARPRSRSYSSTSIEEAMKRGEDPPTPPPRPQKTHSRASSLDLNKVFQPSVPATKSGLLPPPPALPPRPCPSQSEQVSEAELLPQLSRAPSQAAESSPAKKDVLYSQPPSKPIRRKFRPENQATENQEPSTAASGPASAATMKPHPTVQKQSSKQKKAIQTAIRKNKEANAVLARLNSELQQQLKEVHQERIALENQLEQLRPVTVL

SEQ ID NO: 19 - DNA, 28 bp, Artificial Sequence
  Description of Artificial Sequence: Synthetic primer
acgttggatggcctcctgttgggtcctc

SEQ ID NO: 20 - DNA, 28 bp, Artificial Sequence
  Description of Artificial Sequence: Synthetic primer
acgttggatgaaggtatggggtgggagc

SEQ ID NO: 21 - DNA, 20 bp, Artificial Sequence
  Description of Artificial Sequence: Synthetic primer
cgcaaacaaaaaggacacac

SEQ ID NO: 22 - DNA, 20 bp, Artificial Sequence
  Description of Artificial Sequence: Synthetic primer
ctcctttgtttccaccatcc

SEQ ID NO: 23 - DNA, 20 bp, Artificial Sequence
  Description of Artificial Sequence: Synthetic primer
ttgctggacaatagaaagac

SEQ ID NO: 24 - DNA, 20 bp, Artificial Sequence
  Description of Artificial Sequence: Synthetic primer
gtgactggaaactgagaatg

SEQ ID NO: 25 - DNA, 21 bp, Artificial Sequence
  Description of Artificial Sequence: Synthetic primer
gaagactgaaaaaaatccacg

SEQ ID NO: 26 - DNA, 21 bp, Artificial Sequence
  Description of Artificial Sequence: Synthetic primer
gctatctctttcacattgctc

SEQ ID NO: 27 - DNA, 20 bp, Artificial Sequence
  Description of Artificial Sequence: Synthetic primer
cgagactaccaggagagccc

SEQ ID NO: 28 - DNA, 19 bp, Artificial Sequence
  Description of Artificial Sequence: Synthetic primer
catccatccaacctggctc

SEQ ID NO: 29 - DNA, 22 bp, Artificial Sequence
  Description of Artificial Sequence: Synthetic primer
aaactgagaatgttgatggaca

SEQ ID NO: 30 - DNA, 21 bp, Artificial Sequence
  Description of Artificial Sequence: Synthetic primer
tcacattgctctgcacttttg

SEQ ID NO: 31 - DNA, 30 bp, Artificial Sequence
  Description of Artificial Sequence: Synthetic primer
acgttggatgtccagcctctaacccacaac

SEQ ID NO: 32 - DNA, 30 bp, Artificial Sequence
  Description of Artificial Sequence: Synthetic primer
acgttggatgcgaaacgctgtgtcaccaac

SEQ ID NO: 33 - DNA, 30 bp, Artificial Sequence
  Description of Artificial Sequence: Synthetic primer
acgttggatgatgctctggacaacaggtgg

SEQ ID NO: 34 - DNA, 30 bp, Artificial Sequence
  Description of Artificial Sequence: Synthetic primer
acgttggatgtgagggaacgaaaagtgcag

SEQ ID NO: 35 - DNA, 30 bp, Artificial Sequence
  Description of Artificial Sequence: Synthetic primer
acgttggatgatccagcttccctcaacctc

SEQ ID NO: 36 - DNA, 30 bp, Artificial Sequence
  Description of Artificial Sequence: Synthetic primer
acgttggatgcagctcagagttgacggaag

SEQ ID NO: 37 - DNA, 30 bp, Artificial Sequence
  Description of Artificial Sequence: Synthetic primer
acgttggatgtttttctgcagaagggcctg

SEQ ID NO: 38 - DNA, 30 bp, Artificial Sequence
  Description of Artificial Sequence: Synthetic primer
acgttggatgcacacaccaccaagctcttc

SEQ ID NO: 39 - DNA, 30 bp, Artificial Sequence
  Description of Artificial Sequence: Synthetic primer
acgttggatgtcaacactgggctcctaggg

SEQ ID NO: 40 - DNA, 30 bp, Artificial Sequence
  Description of Artificial Sequence: Synthetic primer
acgttggatgtctcctgacctcgtgatctg

SEQ ID NO: 41 - DNA, 30 bp, Artificial Sequence; identical to SEQ ID NO: 39
  Description of Artificial Sequence: Synthetic primer

SEQ ID NO: 42 - DNA, 30 bp, Artificial Sequence; identical to SEQ ID NO: 40
  Description of Artificial Sequence: Synthetic primer

SEQ ID NO: 43 - DNA, 30 bp, Artificial Sequence
  Description of Artificial Sequence: Synthetic primer
acgttggatgtagacaccagctctgtaggg

SEQ ID NO: 44 - DNA, 30 bp, Artificial Sequence
  Description of Artificial Sequence: Synthetic primer
acgttggatgattacaggcatgagccactg

SEQ ID NO: 45 - DNA, 36 bp, Artificial Sequence
  Description of Artificial Sequence: Synthetic primer
ggcgcacgcctccacgtcatctctgtgctctggacg

SEQ ID NO: 46 - DNA, 30 bp, Artificial Sequence
  Description of Artificial Sequence: Synthetic primer
ggcgcacgcctgtgtggtgcagcccagaat

SEQ ID NO: 47 - DNA, 30 bp, Artificial Sequence
  Description of Artificial Sequence: Synthetic primer
acgttggatgtagaatccaaaagatggtgg

SEQ ID NO: 48 - DNA, 30 bp, Artificial Sequence
  Description of Artificial Sequence: Synthetic primer
acgttggatgtgctgggattacaggtgaac

SEQ ID NO: 49 - DNA, 30 bp, Artificial Sequence
  Description of Artificial Sequence: Synthetic primer
acgttggatgctttgaggagaaagagtctg

SEQ ID NO: 50 - DNA, 30 bp, Artificial Sequence
  Description of Artificial Sequence: Synthetic primer
acgttggatgttaaagccagggtttgaggc

SEQ ID NO: 51 - DNA, 30 bp, Artificial Sequence
  Description of Artificial Sequence: Synthetic primer
acgttggatgtcctgacctcaagtgatctg

SEQ ID NO: 52 - DNA, 30 bp, Artificial Sequence
  Description of Artificial Sequence: Synthetic primer
acgttggatgaaagagctgatttccagcgg

SEQ ID NO: 53 - DNA, 30 bp, Artificial Sequence
  Description of Artificial Sequence: Synthetic primer
acgttggatgaagtgctggaattacagccg

SEQ ID NO: 54 - DNA, 30 bp, Artificial Sequence
  Description of Artificial Sequence: Synthetic primer
acgttggatgaaaatatgctggccaggccg

SEQ ID NO: 55 - DNA, 30 bp, Artificial Sequence
  Description of Artificial Sequence: Synthetic primer
acgttggatgattgctcgaaccttgaaccg

SEQ ID NO: 56 - DNA, 30 bp, Artificial Sequence
  Description of Artificial Sequence: Synthetic primer
acgttggatggacagagtctcactctgtag

SEQ ID NO: 57 - DNA, 30 bp, Artificial Sequence
  Description of Artificial Sequence: Synthetic primer
acgttggatgagtgagaagaacagaagggc

SEQ ID NO: 58 - DNA, 30 bp, Artificial Sequence
  Description of Artificial Sequence: Synthetic primer
acgttggatggccaagccacatcaatatcc

SEQ ID NO: 59 - DNA, 30 bp, Artificial Sequence
  Description of Artificial Sequence: Synthetic primer
acgttggatgtgtgtcctcacccaaatctc

SEQ ID NO: 60 - DNA, 30 bp, Artificial Sequence
  Description of Artificial Sequence: Synthetic primer
acgttggatgcctgcccccataattcaatc

SEQ ID NO: 61 - DNA, 30 bp, Artificial Sequence
  Description of Artificial Sequence: Synthetic primer
acgttggatgccatgacgcccagctaattt

SEQ ID NO: 62 - DNA, 30 bp, Artificial Sequence
  Description of Artificial Sequence: Synthetic primer
acgttggatgaaccaggagtttgaggccag

SEQ ID NO: 63 - DNA, 30 bp, Artificial Sequence
  Description of Artificial Sequence: Synthetic primer
acgttggatgccgggttcaagcaattcttc

SEQ ID NO: 64 - DNA, 30 bp, Artificial Sequence
  Description of Artificial Sequence: Synthetic primer
acgttggatgaattacccaggcatggtggc

SEQ ID NO: 65 - DNA, 30 bp, Artificial Sequence
  Description of Artificial Sequence: Synthetic primer
acgttggatggcttttttcactcagcatgg

SEQ ID NO: 66 - DNA, 30 bp, Artificial Sequence
  Description of Artificial Sequence: Synthetic primer
acgttggatgggtagagtatacttaattgc

SEQ ID NO: 67 - DNA, 30 bp, Artificial Sequence
  Description of Artificial Sequence: Synthetic primer
acgttggatgtcaggtttcaccatgttgcc

SEQ ID NO: 68 - DNA, 30 bp, Artificial Sequence
  Description of Artificial Sequence: Synthetic primer
acgttggatgcagaactttgggaagcctag

SEQ ID NO: 69 - DNA, 36 bp, Artificial Sequence
  Description of Artificial Sequence: Synthetic primer
ggcgcacgcctccacgaacagccatgtgtaaccctc

SEQ ID NO: 70 - DNA, 30 bp, Artificial Sequence
  Description of Artificial Sequence: Synthetic primer
ggcgcacgcctaatcgcaggagagacacac

SEQ ID NO: 71 - DNA, 30 bp, Artificial Sequence
  Description of Artificial Sequence: Synthetic primer
acgttggatgacttcattccttgaaccggg

SEQ ID NO: 72 - DNA, 30 bp, Artificial Sequence
  Description of Artificial Sequence: Synthetic primer
acgttggatgactgcattctcatgaggagc

SEQ ID NO: 73 - DNA, 30 bp, Artificial Sequence
  Description of Artificial Sequence: Synthetic primer
acgttggatgtgcgtctggcctaatatttc

SEQ ID NO: 74 - DNA, 31 bp, Artificial Sequence
  Description of Artificial Sequence: Synthetic primer
acgttggatgcactattgaaattttctagtc

SEQ ID NO: 75 - DNA, 30 bp, Artificial Sequence
  Description of Artificial Sequence: Synthetic primer
acgttggatgtgaactcctgacctcaagtg

SEQ ID NO: 76 - DNA, 30 bp, Artificial Sequence
  Description of Artificial Sequence: Synthetic primer
acgttggatggccaagtgtagtgattcacg

SEQ ID NO: 77 - DNA, 30 bp, Artificial Sequence
  Description of Artificial Sequence: Synthetic primer
acgttggatgaccatggtctgcttggcaac

SEQ ID NO: 78 - DNA, 30 bp, Artificial Sequence
  Description of Artificial Sequence: Synthetic primer
acgttggatggccttttgttatgcccagac

SEQ ID NO: 79 - DNA, 30 bp, Artificial Sequence
  Description of Artificial Sequence: Synthetic primer
acgttggatgttccaagtagctgggaccac

SEQ ID NO: 80 - DNA, 30 bp, Artificial Sequence
  Description of Artificial Sequence: Synthetic primer
acgttggatgtattacactggaacagctcg

SEQ ID NO: 81 - DNA, 30 bp, Artificial Sequence
  Description of Artificial Sequence: Synthetic primer
acgttggatggaccttcaagatcctgtctc

SEQ ID NO: 82 - DNA, 30 bp, Artificial Sequence
  Description of Artificial Sequence: Synthetic primer
acgttggatgatagcctcatctgtgtcagc

SEQ ID NO: 83 - DNA, 30 bp, Artificial Sequence; identical to SEQ ID NO: 81
  Description of Artificial Sequence: Synthetic primer

SEQ ID NO: 84 - DNA, 30 bp, Artificial Sequence; identical to SEQ ID NO: 82
  Description of Artificial Sequence: Synthetic primer

SEQ ID NO: 85 - DNA, 36 bp, Artificial Sequence
  Description of Artificial Sequence: Synthetic primer
ggcgcacgcctccacgatggcttggcttgtctgtac

SEQ ID NO: 86 - DNA, 30 bp, Artificial Sequence
  Description of Artificial Sequence: Synthetic primer
ggcgcacgcccacagcagcttctgctatag

SEQ ID NO: 87 - DNA, 30 bp, Artificial Sequence
  Description of Artificial Sequence: Synthetic primer
acgttggatggggttagaagactcagtcac

SEQ ID NO: 88 - DNA, 30 bp, Artificial Sequence
  Description of Artificial Sequence: Synthetic primer
acgttggatgtaccaagtgtcccacaaagc

SEQ ID NO: 89 - DNA, 35 bp, Artificial Sequence
  Description of Artificial Sequence: Synthetic primer
ggcgcacgcctccacgcaaccctggtgtaccctcc

SEQ ID NO: 90 - DNA, 29 bp, Artificial Sequence
  Description of Artificial Sequence: Synthetic primer
ggcgcacgccctgcccccgccgtgagaaa

SEQ ID NO: 91 - DNA, 30 bp, Artificial Sequence
  Description of Artificial Sequence: Synthetic primer
acgttggatgtttttgagacggagtctcgc

SEQ ID NO: 92 - DNA, 30 bp, Artificial Sequence
  Description of Artificial Sequence: Synthetic primer
acgttggatgaggagaatggctgaacctgg

SEQ ID NO: 93 - DNA, 30 bp, Artificial Sequence
  Description of Artificial Sequence: Synthetic primer
acgttggatgcgtgtctgtttccactcttg

SEQ ID NO: 94 - DNA, 30 bp, Artificial Sequence
  Description of Artificial Sequence: Synthetic primer
acgttggatgccctgtgtagaaaagaaggc

SEQ ID NO: 95 - DNA, 30 bp, Artificial Sequence
  Description of Artificial Sequence: Synthetic primer
acgttggatgtggcatctttgggcgttttg

SEQ ID NO: 96 - DNA, 30 bp, Artificial Sequence
  Description of Artificial Sequence: Synthetic primer
acgttggatgcaacccgcttcagccttgag

SEQ ID NO: 97 - DNA, 31 bp, Artificial Sequence
  Description of Artificial Sequence: Synthetic primer
acgttggatggaggactgaagaaagaatttg

SEQ ID NO: 98 - DNA, 30 bp, Artificial Sequence
  Description of Artificial Sequence: Synthetic primer
acgttggatggcgagactctgtctcaaata

SEQ ID NO: 99 - DNA, 30 bp, Artificial Sequence
  Description of Artificial Sequence: Synthetic primer
acgttggatgtctctttttggacttcaggg

SEQ ID NO: 100 - DNA, 30 bp, Artificial Sequence
  Description of Artificial Sequence: Synthetic primer
acgttggatgtcccacagtgctaggattac

SEQ ID NO: 101 - DNA, 30 bp, Artificial Sequence
  Description of Artificial Sequence: Synthetic primer
acgttggatgtcaggtcttccatgagtgag

SEQ ID NO: 102 - DNA, 30 bp, Artificial Sequence
  Description of Artificial Sequence: Synthetic primer
acgttggatgttcaagcttagcttctgggc

SEQ ID NO: 103 - DNA, 30 bp, Artificial Sequence
  Description of Artificial Sequence: Synthetic primer
acgttggatgtcctccagttgggagtcctt

SEQ ID NO: 104 - DNA, 30 bp, Artificial Sequence
  Description of Artificial Sequence: Synthetic primer
acgttggatgcacctggaagactctctcac

SEQ ID NO: 105 - DNA, 36 bp, Artificial Sequence
  Description of Artificial Sequence: Synthetic primer
ggcgcacgcctccacgcgggagcgtctcttggtaac

SEQ ID NO: 106 - DNA, 29 bp, Artificial Sequence
  Description of Artificial Sequence: Synthetic primer
ggcgcacgcccaggcgcgaaagctccttc

SEQ ID NO: 107 - DNA, 30 bp, Artificial Sequence
  Description of Artificial Sequence: Synthetic primer
acgttggatgagcctgctcttcccaagtcc

SEQ ID NO: 108 - DNA, 29 bp, Artificial Sequence
  Description of Artificial Sequence: Synthetic primer
acgttggatgcggtccctggagatctgag

SEQ ID NO: 109 - DNA, 30 bp, Artificial Sequence
  Description of Artificial Sequence: Synthetic primer
acgttggatggagccttcaagctcgaactc

SEQ ID NO: 110 - DNA, 30 bp, Artificial Sequence
  Description of Artificial Sequence: Synthetic primer
acgttggatgagccgcgagccacttgtttg

SEQ ID NO: 111 - DNA, 30 bp, Artificial Sequence
  Description of Artificial Sequence: Synthetic primer
acgttggatgaagcagaggatgtgagaagg

SEQ ID NO: 112 - DNA, 30 bp, Artificial Sequence
  Description of Artificial Sequence: Synthetic primer
acgttggatgaagcatctggcctgtcactc

SEQ ID NO: 113 - DNA, 30 bp, Artificial Sequence
  Description of Artificial Sequence: Synthetic primer
acgttggatgcacgcccagctaattttttc

SEQ ID NO: 114 - DNA, 30 bp, Artificial Sequence
  Description of Artificial Sequence: Synthetic primer
acgttggatgagtcaggagatctagagcac

SEQ ID NO: 115 - DNA, 30 bp, Artificial Sequence
  Description of Artificial Sequence: Synthetic primer
acgttggatgaagtgctgggattacaagcg

SEQ ID NO: 116 - DNA, 30 bp, Artificial Sequence
  Description of Artificial Sequence: Synthetic primer
acgttggatgaaagcattggcccagtatcg

SEQ ID NO: 117 - DNA, 30 bp, Artificial Sequence
  Description of Artificial Sequence: Synthetic primer
acgttggatgtctgaaacagggcagaaacc

SEQ ID NO: 118 - DNA, 30 bp, Artificial Sequence
  Description of Artificial Sequence: Synthetic primer
acgttggatgggatgcttacgtttacccag

SEQ ID NO: 119 - DNA, 30 bp, Artificial Sequence
  Description of Artificial Sequence: Synthetic primer
acgttggatgttggcaacagagtgagaccc

SEQ ID NO: 120 - DNA, 30 bp, Artificial Sequence
  Description of Artificial Sequence: Synthetic primer
acgttggatgagcttccagaatgacctacg

SEQ ID NO: 121 - DNA, 30 bp, Artificial Sequence
  Description of Artificial Sequence: Synthetic primer
acgttggatgtcagtccccactctgtgcaa

SEQ ID NO: 122 - DNA, 30 bp, Artificial Sequence
  Description of Artificial Sequence: Synthetic primer
acgttggatgacagagcaaagttgggcacc

SEQ ID NO: 123 - DNA, 30 bp, Artificial Sequence
  Description of Artificial Sequence: Synthetic primer
acgttggatgaaaagtgcttattgggccgg

SEQ ID NO: 124 - DNA, 30 bp, Artificial Sequence
  Description of Artificial Sequence: Synthetic primer
acgttggatgaactgccgacctcaggtgat

SEQ ID NO: 125 - DNA, 30 bp, Artificial Sequence
  Description of Artificial Sequence: Synthetic primer
acgttggatgaacgagcgaaactccgtctc

SEQ ID NO: 126 - DNA, 30 bp, Artificial Sequence
  Description of Artificial Sequence: Synthetic primer
acgttggatgtgatagcaggtgctgcagtg

SEQ ID NO: 127 - DNA, 36 bp, Artificial Sequence
  Description of Artificial Sequence: Synthetic primer
ggcgcacgcctccacgtgggaacccctgagctttta

SEQ ID NO: 128 - DNA, 30 bp, Artificial Sequence
  Description of Artificial Sequence: Synthetic primer
ggcgcacgccgttggaagcacaaattcggc

SEQ ID NO: 129 - DNA, 36 bp, Artificial Sequence
  Description of Artificial Sequence: Synthetic primer
ggcgcacgcctccacgaagcacccacctcaatacgg

SEQ ID NO: 130 - DNA, 20 bp, Artificial Sequence
  Description of Artificial Sequence: Synthetic primer
tccgagttgggacaggtttc

SEQ ID NO: 131 - DNA, 31 bp, Artificial Sequence
  Description of Artificial Sequence: Synthetic primer
acgttggatgtgagctcaggaaccaggtgac

SEQ ID NO: 132 - DNA, 30 bp, Artificial Sequence
  Description of Artificial Sequence: Synthetic primer
acgttggatgcagcatcgacatgtggtgag

SEQ ID NO: 133 - DNA, 30 bp, Artificial Sequence
  Description of Artificial Sequence: Synthetic primer
acgttggatgtcctcgctatgttggaaatg

SEQ ID NO: 134 - DNA, 30 bp, Artificial Sequence
  Description of Artificial Sequence: Synthetic primer
acgttggatgaccacaactcaaagacagcg

SEQ ID NO: 135 - DNA, 30 bp, Artificial Sequence
  Description of Artificial Sequence: Synthetic primer
acgttggatgagctgctgtgacacccaagg

SEQ ID NO: 136 - DNA, 30 bp, Artificial Sequence
  Description of Artificial Sequence: Synthetic primer
acgttggatgaagctctgctggagccaatc

SEQ ID NO: 137 - DNA, 29 bp, Artificial Sequence
  Description of Artificial Sequence: Synthetic primer
acgttggatgaagccaggtcagccgtgca

SEQ ID NO: 138 - DNA, 30 bp, Artificial Sequence
  Description of Artificial Sequence: Synthetic primer
acgttggatgtcctcaagggcctgttggtg

SEQ ID NO: 139 - DNA, 30 bp, Artificial Sequence
  Description of Artificial Sequence: Synthetic primer
acgttggatgacactcgtgtggagaatccc

SEQ ID NO: 140 - DNA, 30 bp, Artificial Sequence
  Description of Artificial Sequence: Synthetic primer
acgttggatgtccctgcagtacggagtacg

SEQ ID NO: 141 - DNA, 30 bp, Artificial Sequence
  Description of Artificial Sequence: Synthetic primer
acgttggatgccacacccagctcatttttg

SEQ ID NO: 142 - DNA, 30 bp, Artificial Sequence
  Description of Artificial Sequence: Synthetic primer
acgttggatggagattgacaccagcctaac

SEQ ID NO: 143 - DNA, 35 bp, Artificial Sequence
  Description of Artificial Sequence: Synthetic primer
ggcgcacgcctccacgcccttgaggcctcccaggg

SEQ ID NO: 144 - DNA, 29 bp, Artificial Sequence
  Description of Artificial Sequence: Synthetic primer
ggcgcacgccggccaggaagcagcagaac

SEQ ID NO: 145 - DNA, 30 bp, Artificial Sequence
  Description of Artificial Sequence: Synthetic primer
acgttggatgcacgcccggctgattttttg

SEQ ID NO: 146 - DNA, 30 bp, Artificial Sequence
  Description of Artificial Sequence: Synthetic primer
acgttggatgcacgaggtcaggagatcaag

SEQ ID NO: 147 - DNA, 30 bp, Artificial Sequence
  Description of Artificial Sequence: Synthetic primer
acgttggatgtaatcccagcactttgggag

SEQ ID NO: 148 - DNA, 30 bp, Artificial Sequence
  Description of Artificial Sequence: Synthetic primer
acgttggatgggtttcaccgtgttagccag

SEQ ID NO: 149 - DNA, 30 bp, Artificial Sequence
  Description of Artificial Sequence: Synthetic primer
acgttggatgcctgtaatcccagcactttg

SEQ ID NO: 150 - DNA, 30 bp, Artificial Sequence
  Description of Artificial Sequence: Synthetic primer
acgttggatgaggatggtcttgatctcctg

SEQ ID NO: 151 - DNA, 30 bp, Artificial Sequence; identical to SEQ ID NO: 150
  Description of Artificial Sequence: Synthetic primer

SEQ ID NO: 152 - DNA, 30 bp, Artificial Sequence; identical to SEQ ID NO: 149
  Description of Artificial Sequence: Synthetic primer

SEQ ID NO: 153 - DNA, 30 bp, Artificial Sequence
  Description of Artificial Sequence: Synthetic primer
acgttggatgatctcctgacctcgtgatcc

SEQ ID NO: 154 - DNA, 30 bp, Artificial Sequence
  Description of Artificial Sequence: Synthetic primer
acgttggatgaaatcctacaaatggccggg

SEQ ID NO: 155 - DNA, 30 bp, Artificial Sequence
  Description of Artificial Sequence: Synthetic primer
acgttggatgaacaaatcctggcgtgggag

SEQ ID NO: 156 - DNA, 30 bp, Artificial Sequence
  Description of Artificial Sequence: Synthetic primer
acgttggatgggatacagctgagccaggac

SEQ ID NO: 157 - DNA, 30 bp, Artificial Sequence
  Description of Artificial Sequence: Synthetic primer
acgttggatggacacttctgtctccctatg

SEQ ID NO: 158 - DNA, 30 bp, Artificial Sequence
  Description of Artificial Sequence: Synthetic primer
acgttggatgaaaagcagtagctgtggacc

SEQ ID NO: 159 - DNA, 30 bp, Artificial Sequence
  Description of Artificial Sequence: Synthetic primer
acgttggatgatcaggtacctgcatggatg

SEQ ID NO: 160 - DNA, 30 bp, Artificial Sequence
  Description of Artificial Sequence: Synthetic primer
acgttggatggcagacactaccttctggag

SEQ ID NO: 161 - DNA, 30 bp, Artificial Sequence
  Description of Artificial Sequence: Synthetic primer
acgttggatgaaaaatgcacgaacgcacgg

SEQ ID NO: 162 - DNA, 30 bp, Artificial Sequence
  Description of Artificial Sequence: Synthetic primer
acgttggatgtagaggagatgtagcaggag

SEQ ID NO: 163 - DNA, 30 bp, Artificial Sequence
  Description of Artificial Sequence: Synthetic primer
acgttggatgacctcttgctggtgctagac

SEQ ID NO: 164 - DNA, 30 bp, Artificial Sequence
  Description of Artificial Sequence: Synthetic primer
acgttggatgctagagcagtggagacattc

SEQ ID NO: 165 - DNA, 30 bp, Artificial Sequence
  Description of Artificial Sequence: Synthetic primer
acgttggatgatcagaggctgcatagcacc

SEQ ID NO: 166 - DNA, 30 bp, Artificial Sequence
  Description of Artificial Sequence: Synthetic primer
acgttggatggatgactagaagggagactg

SEQ ID NO: 167 - DNA, 30 bp, Artificial Sequence
  Description of Artificial Sequence: Synthetic primer
acgttggatgtgttcatgctgaagctgctg

SEQ ID NO: 168 - DNA, 30 bp, Artificial Sequence
  Description of Artificial Sequence: Synthetic primer
acgttggatggaaaagagaaacgggagcag

SEQ ID NO: 169 - DNA, 30 bp, Artificial Sequence
  Description of Artificial Sequence: Synthetic primer
acgttggatgttgttcccaggagtcatggc

SEQ ID NO: 170 - DNA, 30 bp, Artificial Sequence
  Description of Artificial Sequence: Synthetic primer
acgttggatgaggtgtcctgggattcagac

SEQ ID NO: 171 - DNA, 30 bp, Artificial Sequence
  Description of Artificial Sequence: Synthetic primer
acgttggatgattgggtggccccttgtttg

SEQ ID NO: 172 - DNA, 30 bp, Artificial Sequence
  Description of Artificial Sequence: Synthetic primer
acgttggatggaggaggtgagtggtcattg

SEQ ID NO: 173 - DNA, 30 bp, Artificial Sequence; identical to SEQ ID NO: 171
  Description of Artificial Sequence: Synthetic primer

SEQ ID NO: 174 - DNA, 30 bp, Artificial Sequence; identical to SEQ ID NO: 172
  Description of Artificial Sequence: Synthetic primer

SEQ ID NO: 175 - DNA, 30 bp, Artificial Sequence
  Description of Artificial Sequence: Synthetic primer
acgttggatgcgcactgagaagaactgttg

SEQ ID NO: 176 - DNA, 30 bp, Artificial Sequence
  Description of Artificial Sequence: Synthetic primer
acgttggatgggctaggtcatgaaaaccag

SEQ ID NO: 177 - DNA, 30 bp, Artificial Sequence
  Description of Artificial Sequence: Synthetic primer
acgttggatgtaaagagtgcattgaggccg

SEQ ID NO: 178 - DNA, 30 bp, Artificial Sequence
  Description of Artificial Sequence: Synthetic primer
acgttggatgaactcctgacctcatgatcc

SEQ ID NO: 179 - DNA, 30 bp, Artificial Sequence
  Description of Artificial Sequence: Synthetic primer
acgttggatgcaaagtgctgggattacagg

SEQ ID NO: 180 - DNA, 30 bp, Artificial Sequence
  Description of Artificial Sequence: Synthetic primer
acgttggatgaacaacatgagaccctgtcg

SEQ ID NO: 181 - DNA, 30 bp, Artificial Sequence
  Description of Artificial Sequence: Synthetic primer
acgttggatgaagtgagcctctcacctcag

SEQ ID NO: 182 - DNA, 30 bp, Artificial Sequence
  Description of Artificial Sequence: Synthetic primer
acgttggatgtagtttacactgccgagtcc

SEQ ID NO: 183 - DNA, 30 bp, Artificial Sequence
  Description of Artificial Sequence: Synthetic primer
acgttggatgctgtgaaggactgaaagctc

SEQ ID NO: 184 - DNA, 30 bp, Artificial Sequence
  Description of Artificial Sequence: Synthetic primer
acgttggatgtgagagcagtggtgagagaa

SEQ ID NO: 185 - DNA, 30 bp, Artificial Sequence
  Description of Artificial Sequence: Synthetic primer
acgttggatggcacttgtggttcctttctg

SEQ ID NO: 186 - DNA, 30 bp, Artificial Sequence
  Description of Artificial Sequence: Synthetic primer
acgttggatgtatcgtggtgaagaagttcc

SEQ ID NO: 187 - DNA, 30 bp, Artificial Sequence
  Description of Artificial Sequence: Synthetic primer
acgttggatggtgtttctgcagcctaactc

SEQ ID NO: 188 - DNA, 30 bp, Artificial Sequence
  Description of Artificial Sequence: Synthetic primer
acgttggatgtaggactgcttcaggtctcg

SEQ ID NO: 189 - DNA, 30 bp, Artificial Sequence
  Description of Artificial Sequence: Synthetic primer
acgttggatgtgaagcagtcctagccagtg

SEQ ID NO: 190 - DNA, 30 bp, Artificial Sequence
  Description of Artificial Sequence: Synthetic primer
acgttggatgaagaaacttctagacccccc

SEQ ID NO: 191 - DNA, 30 bp, Artificial Sequence
  Description of Artificial Sequence: Synthetic primer
acgttggatgttcatgccttctgccttgcc

SEQ ID NO: 192 - DNA, 30 bp, Artificial Sequence
  Description of Artificial Sequence: Synthetic primer
acgttggatgatctcagccttccaaagtgc

SEQ ID NO: 193 - DNA, 30 bp, Artificial Sequence
  Description of Artificial Sequence: Synthetic primer
acgttggatgatgaaggcacaccagctctg

SEQ ID NO: 194 - DNA, 30 bp, Artificial Sequence
  Description of Artificial Sequence: Synthetic primer
acgttggatgtaatgacacgacctacacac

SEQ ID NO: 195 - DNA, 30 bp, Artificial Sequence; identical to SEQ ID NO: 193
  Description of Artificial Sequence: Synthetic primer

SEQ ID NO: 196 - DNA, 30 bp, Artificial Sequence
  Description of Artificial Sequence: Synthetic primer
acgttggatgcggtcttaatgacacgacct

SEQ ID NO: 197 - DNA, 30 bp, Artificial Sequence
  Description of Artificial Sequence: Synthetic primer
acgttggatgaggctaaggcagtaggattg

SEQ ID NO: 198 - DNA, 30 bp, Artificial Sequence
  Description of Artificial Sequence: Synthetic primer
acgttggatgtttggtaaagacggcctcac

SEQ ID NO: 199 - DNA, 30 bp, Artificial Sequence
  Description of Artificial Sequence: Synthetic primer
acgttggatgcacaaagtgctcaatcccag

SEQ ID NO: 200 - DNA, 30 bp, Artificial Sequence
  Description of Artificial Sequence: Synthetic primer
acgttggatgaccatattgattgggctggg

SEQ ID NO: 201 - DNA, 30 bp, Artificial Sequence
  Description of Artificial Sequence: Synthetic primer
acgttggatgctgagattgggctgttgcac

SEQ ID NO: 202 - DNA, 30 bp, Artificial Sequence
  Description of Artificial Sequence: Synthetic primer
acgttggatgcttggcattttactctacgc

SEQ ID NO: 203 - DNA, 36 bp, Artificial Sequence
  Description of Artificial Sequence: Synthetic primer
ggcgcacgcctccacgtctcctcgactgctttagtg

SEQ ID NO: 204 - DNA, 30 bp, Artificial Sequence
  Description of Artificial Sequence: Synthetic primer
ggcgcacgccccagtggtttattttcccgc

SEQ ID NO: 205 - DNA, 36 bp, Artificial Sequence
  Description of Artificial Sequence: Synthetic primer
ggcgcacgcctccacgaaagagcttctcacacgtgg

SEQ ID NO: 206 - DNA, 30 bp, Artificial Sequence
  Description of Artificial Sequence: Synthetic primer
ggcgcacgccggcagctgtcaattctcatg

SEQ ID NO: 207 - DNA, 36 bp, Artificial Sequence
  Description of Artificial Sequence: Synthetic primer
ggcgcacgcctccacgataggcagagatgtccagag

SEQ ID NO: 208 - DNA, 20 bp, Artificial Sequence
  Description of Artificial Sequence: Synthetic primer
aaaaagcgaaaggcagcagc

SEQ ID NO: 209 - DNA, 36 bp, Artificial Sequence
  Description of Artificial Sequence: Synthetic primer
ggcgcacgcctccacgttctctctgtcccagtttcc

SEQ ID NO: 210 - DNA, 30 bp, Artificial Sequence
  Description of Artificial Sequence: Synthetic primer
ggcgcacgccaatcgcaaagtgcagtgcag

SEQ ID NO: 211 - DNA, 30 bp, Artificial Sequence
  Description of Artificial Sequence: Synthetic primer
acgttggatgcaggtccacgtgagagtgtg

SEQ ID NO: 212 - DNA, 30 bp, Artificial Sequence
  Description of Artificial Sequence: Synthetic primer
acgttggatgcagtcagcagctctcagaac

SEQ ID NO: 213 - DNA, 30 bp, Artificial Sequence
  Description of Artificial Sequence: Synthetic primer
acgttggatgtgtagtggcctgtaggagca

SEQ ID NO: 214 - DNA, 30 bp, Artificial Sequence
  Description of Artificial Sequence: Synthetic primer
acgttggatgagatgagggtggctgagatg

SEQ ID NO: 215 - DNA, 30 bp, Artificial Sequence
  Description of Artificial Sequence: Synthetic primer
acgttggatgcgtcaattaaggctcaaagc

SEQ ID NO: 216 - DNA, 30 bp, Artificial Sequence
  Description of Artificial Sequence: Synthetic primer
acgttggatgccttctccaaattccacgtc

SEQ ID NO: 217 - DNA, 17 bp, Artificial Sequence
  Description of Artificial Sequence: Synthetic primer
accaaccccacgctctg

SEQ ID NO: 218 - DNA, 17 bp, Artificial Sequence
  Description of Artificial Sequence: Synthetic primer
cttgtgaagctgagtgg

SEQ ID NO: 219 - DNA, 17 bp, Artificial Sequence
  Description of Artificial Sequence: Synthetic primer
cggaaggtggatcagcg

SEQ ID NO: 220 - DNA, 17 bp, Artificial Sequence
  Description of Artificial Sequence: Synthetic primer
tccagctgctttccccc

SEQ ID NO: 221 - DNA, 17 bp, Artificial Sequence
  Description of Artificial Sequence: Synthetic primer
tcggcctcccaaagagc

SEQ ID NO: 222 - DNA, 17 bp, Artificial Sequence
  Description of Artificial Sequence: Synthetic primer
acaggcgtgagccaccg

SEQ ID NO: 223 - DNA, 19 bp, Artificial Sequence
  Description of Artificial Sequence: Synthetic primer
gcggatcctatcattttta

SEQ ID NO: 224 - DNA, 20 bp, Artificial Sequence
  Description of Artificial Sequence: Synthetic primer
gtgcagcccagaatggtttc

SEQ ID NO: 225 - DNA, 17 bp, Artificial Sequence
  Description of Artificial Sequence: Synthetic primer
aaagaatcccaagggac

SEQ ID NO: 226 - DNA, 18 bp, Artificial Sequence
  Description of Artificial Sequence: Synthetic primer
ctgggccaatttaaaagt

SEQ ID NO: 227 - DNA, 17 bp, Artificial Sequence
  Description of Artificial Sequence: Synthetic primer
tttccagcggtacagtc

SEQ ID NO: 228 - DNA, 17 bp, Artificial Sequence
  Description of Artificial Sequence: Synthetic primer
gctcaggcctgtaaccc

SEQ ID NO: 229 - DNA, 17 bp, Artificial Sequence
  Description of Artificial Sequence: Synthetic primer
gtgcgatctcgctcacc

SEQ ID NO: 230 - DNA, 17 bp, Artificial Sequence
  Description of Artificial Sequence: Synthetic primer
tcctaacagctgccaca

SEQ ID NO: 231 - DNA, 19 bp, Artificial Sequence
  Description of Artificial Sequence: Synthetic primer
ccataattcaatcacctcc

SEQ ID NO: 232 - DNA, 17 bp, Artificial Sequence
  Description of Artificial Sequence: Synthetic primer
gccaacgtggcgaaacc

SEQ ID NO: 233 - DNA, 17 bp, Artificial Sequence
  Description of Artificial Sequence: Synthetic primer
ggcgcacacctgtagtc

SEQ ID NO: 234 - DNA, 19 bp, Artificial Sequence
  Description of Artificial Sequence: Synthetic primer
aagagaaatggaacacttc

SEQ ID NO: 235 - DNA, 17 bp, Artificial Sequence
  Description of Artificial Sequence: Synthetic primer
caggcagatcacttgag

SEQ ID NO: 236 - DNA, 19 bp, Artificial Sequence
  Description of Artificial Sequence: Synthetic primer
cctccctcttcctcattcc

SEQ ID NO: 237 - DNA, 17 bp, Artificial Sequence
  Description of Artificial Sequence: Synthetic primer
ctcttctaagcccattc

SEQ ID NO: 238 - DNA, 20 bp, Artificial Sequence
  Description of Artificial Sequence: Synthetic primer
gacttatttcatcttcctca

SEQ ID NO: 239 - DNA, 17 bp, Artificial Sequence
  Description of Artificial Sequence: Synthetic primer
attcacgcctgtaatcc

SEQ ID NO: 240 - DNA, 17 bp, Artificial Sequence
  Description of Artificial Sequence: Synthetic primer
agggctccttggtctag

SEQ ID NO: 241 - DNA, 17 bp, Artificial Sequence
  Description of Artificial Sequence: Synthetic primer
ggcacctgggtgacttg

SEQ ID NO: 242 - DNA, 17 bp, Artificial Sequence
  Description of Artificial Sequence: Synthetic primer
ctaagcactgagcgata

SEQ ID NO: 243 - DNA, 17 bp, Artificial Sequence
  Description of Artificial Sequence: Synthetic primer
ctgcactaagcactgag

SEQ ID NO: 244 - DNA, 21 bp, Artificial Sequence
  Description of Artificial Sequence: Synthetic primer
ttctgctataggtctctgaca

SEQ ID NO: 245 - DNA, 18 bp, Artificial Sequence
  Description of Artificial Sequence: Synthetic primer
ccacaaagctgtaaaaca

SEQ ID NO: 246 - DNA, 18 bp, Artificial Sequence
  Description of Artificial Sequence: Synthetic primer
cgccgtgagaaactgcag

SEQ ID NO: 247 - DNA, 17 bp, Artificial Sequence
  Description of Artificial Sequence: Synthetic primer
gcagtgagctgggatcg

SEQ ID NO: 248 - DNA, 17 bp, Artificial Sequence
  Description of Artificial Sequence: Synthetic primer
aagaaggcaccagactc

SEQ ID NO: 249 - DNA, 17 bp, Artificial Sequence
  Description of Artificial Sequence: Synthetic primer
ccttgagcactggagtc

SEQ ID NO: 250 - DNA, 24 bp, Artificial Sequence
  Description of Artificial Sequence: Synthetic primer
acactttttatatttgacaaactt

SEQ ID NO: 251 - DNA, 17 bp, Artificial Sequence
  Description of Artificial Sequence: Synthetic primer
gctaggattacaggtgt

SEQ ID NO: 252 - DNA, 17 bp, Artificial Sequence
  Description of Artificial Sequence: Synthetic primer
cagctatgtcagcattc

SEQ ID NO: 253 - DNA, 17 bp, Artificial Sequence
  Description of Artificial Sequence: Synthetic primer
ctctcacctggaggacc

SEQ ID NO: 254 - DNA, 19 bp, Artificial Sequence
  Description of Artificial Sequence: Synthetic primer
aagctccttcccgggcttc

SEQ ID NO: 255 - DNA, 17 bp, Artificial Sequence
  Description of Artificial Sequence: Synthetic primer
ggctcagggatgcctcg

SEQ ID NO: 256 - DNA, 17 bp, Artificial Sequence
  Description of Artificial Sequence: Synthetic primer
tgtggggagaatttaca

SEQ ID NO: 257 - DNA, 17 bp, Artificial Sequence
  Description of Artificial Sequence: Synthetic primer
tgatggcctagtctcaa

SEQ ID NO: 258 - DNA, 17 bp, Artificial Sequence
  Description of Artificial Sequence: Synthetic primer
tagagcaccctgactaa

SEQ ID NO: 259 - DNA, 18 bp, Artificial Sequence
  Description of Artificial Sequence: Synthetic primer
ccaccttttctcatcaga

SEQ ID NO: 260 - DNA, 17 bp, Artificial Sequence
  Description of Artificial Sequence: Synthetic primer
acccagaaatggtacaa

SEQ ID NO: 261 - DNA, 19 bp, Artificial Sequence
  Description of Artificial Sequence: Synthetic primer
gtggtgtttttggtttttt

SEQ ID NO: 262 - DNA, 17 bp, Artificial Sequence
  Description of Artificial Sequence: Synthetic primer
cccctgcccagttcaaa

SEQ ID NO: 263 - DNA, 17 bp, Artificial Sequence
  Description of Artificial Sequence: Synthetic primer
gtgctgggattacaggc

SEQ ID NO: 264 - DNA, 17 bp, Artificial Sequence
  Description of Artificial Sequence: Synthetic primer
ccccacctcagggagaa

SEQ ID NO: 265 - DNA, 20 bp, Artificial Sequence
  Description of Artificial Sequence: Synthetic primer
cacaaattcggctgaggcct

SEQ ID NO: 266 - DNA, 18 bp, Artificial Sequence
  Description of Artificial Sequence: Synthetic primer
ggacaggtttccaggcca

SEQ ID NO: 267 - DNA, 17 bp, Artificial Sequence
  Description of Artificial Sequence: Synthetic primer
catgtggtgaggagata

SEQ ID NO: 268 - DNA, 17 bp, Artificial Sequence
  Description of Artificial Sequence: Synthetic primer
cacccaccactcctccc

SEQ ID NO: 269 - DNA, 17 bp, Artificial Sequence
  Description of Artificial Sequence: Synthetic primer
ctgacctggcttcgggg

SEQ ID NO: 270 - DNA, 17 bp, Artificial Sequence
  Description of Artificial Sequence: Synthetic primer
accccaagctctgctgg

SEQ ID NO: 271 - DNA, 17 bp, Artificial Sequence
  Description of Artificial Sequence: Synthetic primer
gagtacggggctcagga

SEQ ID NO: 272 - DNA, 17 bp, Artificial Sequence
  Description of Artificial Sequence: Synthetic primer
caacatggtgaaacccc

SEQ ID NO: 273 - DNA, 19 bp, Artificial Sequence
  Description of Artificial Sequence: Synthetic primer
gtccaaaccagggctgtcc

SEQ ID NO: 274 - DNA, 17 bp, Artificial Sequence
  Description of Artificial Sequence: Synthetic primer
atcaagaccatcctggc

SEQ ID NO: 275 - DNA, 17 bp, Artificial Sequence
  Description of Artificial Sequence: Synthetic primer
gttagccaggatggtct

SEQ ID NO: 276 - DNA, 17 bp, Artificial Sequence
  Description of Artificial Sequence: Synthetic primer
ctcctgacctcgtgatc

SEQ ID NO: 277 - DNA, 17 bp, Artificial Sequence
  Description of Artificial Sequence: Synthetic primer
cagcactttgggaggcc

SEQ ID NO: 278 - DNA, 17 bp, Artificial Sequence
  Description of Artificial Sequence: Synthetic primer
cccagcactttgggagg

SEQ ID NO: 279 - DNA, 17 bp, Artificial Sequence
  Description of Artificial Sequence: Synthetic primer
tgagccaggacgttccc

SEQ ID NO: 280 - DNA, 17 bp, Artificial Sequence
  Description of Artificial Sequence: Synthetic primer
ctctgtgcttgcaccct

SEQ ID NO: 281 - DNA, 17 bp, Artificial Sequence
  Description of Artificial Sequence: Synthetic primer
gtgtccttctgttcgtt

SEQ ID NO: 282 - DNA, 17 bp, Artificial Sequence
  Description of Artificial Sequence: Synthetic primer
ccaaaatccgagtgacg

SEQ ID NO: 283 - DNA, 17 bp, Artificial Sequence
  Description of Artificial Sequence: Synthetic primer
tgctgaaaaccctgccc

SEQ ID NO: 284 - DNA, 17 bp, Artificial Sequence
  Description of Artificial Sequence: Synthetic primer
ctcaagttctccccacc

SEQ ID NO: 285 - DNA, 17 bp, Artificial Sequence
  Description of Artificial Sequence: Synthetic primer
gagcagtggaggaggcc

SEQ ID NO: 286 - DNA, 17 bp, Artificial Sequence
  Description of Artificial Sequence: Synthetic primer
ggattcagactcaaccc

SEQ ID NO: 287 - DNA, 17 bp, Artificial Sequence
  Description of Artificial Sequence: Synthetic primer
agtggtcattgtgggaa

SEQ ID NO: 288 - DNA, 17 bp, Artificial Sequence
  Description of Artificial Sequence: Synthetic primer
tggtcattgtgggaacg

SEQ ID NO: 289 - DNA, 17 bp, Artificial Sequence
  Description of Artificial Sequence: Synthetic primer
gggacagggagagaagg

SEQ ID NO: 290 - DNA, 17 bp, Artificial Sequence
  Description of Artificial Sequence: Synthetic primer
gggattacaggcgtgag

SEQ ID NO: 291 - DNA, 17 bp, Artificial Sequence
  Description of Artificial Sequence: Synthetic primer
agagtgcattgaggccg

SEQ ID NO: 292 - DNA, 17 bp, Artificial Sequence
  Description of Artificial Sequence: Synthetic primer
tcatgttggcagtccca

SEQ ID NO: 293 - DNA, 17 bp, Artificial Sequence
  Description of Artificial Sequence: Synthetic primer
ggtgagagaatccgtat

SEQ ID NO: 294 - DNA, 19 bp, Artificial Sequence
  Description of Artificial Sequence: Synthetic primer
gaagttcctttctgttctt

SEQ ID NO: 295 - DNA, 17 bp, Artificial Sequence
  Description of Artificial Sequence: Synthetic primer
tcaaagtgtccttgggc

SEQ ID NO: 296 - DNA, 17 bp, Artificial Sequence
  Description of Artificial Sequence: Synthetic primer
caagtgaaagtctggcc

SEQ ID NO: 297 - DNA, 17 bp, Artificial Sequence
  Description of Artificial Sequence: Synthetic primer
gattacaggtgtgagca

SEQ ID NO: 298 - DNA, 18 bp, Artificial Sequence
  Description of Artificial Sequence: Synthetic primer
gacctacacacatgtgaa

SEQ ID NO: 299 - DNA, 17 bp, Artificial Sequence
  Description of Artificial Sequence: Synthetic primer
gacacgacctacacaca

SEQ ID NO: 300 - DNA, 17 bp, Artificial Sequence
  Description of Artificial Sequence: Synthetic primer
acggcctcactatgttg

SEQ ID NO: 301 - DNA, 17 bp, Artificial Sequence
  Description of Artificial Sequence: Synthetic primer
ctggtcttgaactgact

SEQ ID NO: 302 - DNA, 17 bp, Artificial Sequence
  Description of Artificial Sequence: Synthetic primer
tcttgctctgttgccca

SEQ ID NO: 303 - DNA, 18 bp, Artificial Sequence
  Description of Artificial Sequence: Synthetic primer
cgcaaacgctgagtgact

SEQ ID NO: 304 - DNA, 19 bp, Artificial Sequence
  Description of Artificial Sequence: Synthetic primer
caattctcatgtcccccac

SEQ ID NO: 305 - DNA, 18 bp, Artificial Sequence
  Description of Artificial Sequence: Synthetic primer
ggtctgcaacaccaagaa

SEQ ID NO: 306 - DNA, 18 bp, Artificial Sequence
  Description of Artificial Sequence: Synthetic primer
ccagtccgggttgggtgc

SEQ ID NO: 307 - DNA, 17 bp, Artificial Sequence
  Description of Artificial Sequence: Synthetic primer
tcagaacgccaggatgc

SEQ ID NO: 308 - DNA, 17 bp, Artificial Sequence
  Description of Artificial Sequence: Synthetic primer
cctccgctgccccagcc

SEQ ID NO: 309 - DNA, 19 bp, Artificial Sequence
  Description of Artificial Sequence: Synthetic primer
ccatgagtgtgggtaataa

SEQ ID NO: 310 - DNA, 30 bp, Artificial Sequence
  Description of Artificial Sequence: Synthetic primer
acgttggatgccacagcccttattacagtc

SEQ ID NO: 311 - DNA, 30 bp, Artificial Sequence
  Description of Artificial Sequence: Synthetic primer
acgttggatggggcaggagagagattctat

SEQ ID NO: 312 - DNA, 36 bp, Artificial Sequence
  Description of Artificial Sequence: Synthetic primer
ggcgcacgcctccacgcaagcaaaactcttctaaag

SEQ ID NO: 313 - DNA, 30 bp, Artificial Sequence
  Description of Artificial Sequence: Synthetic primer
ggcgcacgccagagattgtgttaaggcatc

SEQ ID NO: 314 - DNA, 30 bp, Artificial Sequence
  Description of Artificial Sequence: Synthetic primer
acgttggatgcccaccaagactgtaaaagc

SEQ ID NO: 315 - DNA, 30 bp, Artificial Sequence
  Description of Artificial Sequence: Synthetic primer
acgttggatgcaggaaacaacagatgctgg

SEQ ID NO: 316 - DNA, 30 bp, Artificial Sequence
  Description of Artificial Sequence: Synthetic primer
acgttggatgagggagtagtgcaagatagg

SEQ ID NO: 317 - DNA, 30 bp, Artificial Sequence
  Description of Artificial Sequence: Synthetic primer
acgttggatgaagttcttcctgacagcttc

SEQ ID NO: 318 - DNA, 30 bp, Artificial Sequence
  Description of Artificial Sequence: Synthetic primer
acgttggatgggacaagttgtttttcactg

SEQ ID NO: 319 - DNA, 30 bp, Artificial Sequence
  Description of Artificial Sequence: Synthetic primer
acgttggatggcttatagtgattcatgccc

SEQ ID NO: 320 - DNA, 31 bp, Artificial Sequence
  Description of Artificial Sequence: Synthetic primer
acgttggatggattagttattgagcagaggg

SEQ ID NO: 321 - DNA, 30 bp, Artificial Sequence
  Description of Artificial Sequence: Synthetic primer
acgttggatgctaccaaaagggcacttgac

SEQ ID NO: 322 - DNA, 30 bp, Artificial Sequence
  Description of Artificial Sequence: Synthetic primer
acgttggatgggtttaggtttcaattctgg

SEQ ID NO: 323 - DNA, 30 bp, Artificial Sequence
  Description of Artificial Sequence: Synthetic primer
acgttggatgccagcatttgtcagatgagg

SEQ ID NO: 324 - DNA, 30 bp, Artificial Sequence
  Description of Artificial Sequence: Synthetic primer
acgttggatggagggagactccatctcaaa

SEQ ID NO: 325 - DNA, 30 bp, Artificial Sequence
  Description of Artificial Sequence: Synthetic primer
acgttggatggagagaggttggaatgacac

SEQ ID NO: 326 - DNA, 30 bp, Artificial Sequence
  Description of Artificial Sequence: Synthetic primer
acgttggatgaagggttaacagagtgcctg

SEQ ID NO: 327 - DNA, 30 bp, Artificial Sequence
  Description of Artificial Sequence: Synthetic primer
acgttggatgctaaggctactacgagcatg

SEQ ID NO: 328 - DNA, 30 bp, Artificial Sequence; identical to SEQ ID NO: 326
  Description of Artificial Sequence: Synthetic primer

SEQ ID NO: 329 - DNA, 30 bp, Artificial Sequence
  Description of Artificial Sequence: Synthetic primer
acgttggatgttttggttgaattctaaggc

SEQ ID NO: 330 - DNA, 31 bp, Artificial Sequence
  Description of Artificial Sequence: Synthetic primer
acgttggatggaggactgtaagcttagaatg

SEQ ID NO: 331 - DNA, 30 bp, Artificial Sequence
  Description of Artificial Sequence: Synthetic primer
acgttggatgtgtagctttttctctagccg

SEQ ID NO: 332 - DNA, 30 bp, Artificial Sequence
  Description of Artificial Sequence: Synthetic primer
acgttggatggagaaaaagctacatggcac

SEQ ID NO: 333 - DNA, 30 bp, Artificial Sequence
  Description of Artificial Sequence: Synthetic primer
acgttggatgttccatctttttagaacgcc

SEQ ID NO: 334 - DNA, 30 bp, Artificial Sequence
  Description of Artificial Sequence: Synthetic primer
acgttggatgtgtatgtaaaaatgatgacc

SEQ ID NO: 335 - DNA, 30 bp, Artificial Sequence
  Description of Artificial Sequence: Synthetic primer
acgttggatgaatgccaaaaggatatttgc

SEQ ID NO: 336 - DNA, 30 bp, Artificial Sequence
  Description of Artificial Sequence: Synthetic primer
acgttggatgaaaactccactgtacactcg

SEQ ID NO: 337 - DNA, 30 bp, Artificial Sequence
  Description of Artificial Sequence: Synthetic primer
acgttggatgtttcagggatctgcaaggtc

SEQ ID NO: 338 - DNA, 31 bp, Artificial Sequence
  Description of Artificial Sequence: Synthetic primer
acgttggatgcaactacctaattcaaatgtc

SEQ ID NO: 339 - DNA, 30 bp, Artificial Sequence
  Description of Artificial Sequence: Synthetic primer
acgttggatggtcattggcaatgaggatgc

SEQ ID NO: 340 - DNA, 30 bp, Artificial Sequence
  Description of Artificial Sequence: Synthetic primer
acgttggatgtcttcccccagatcatgttg

SEQ ID NO: 341 - DNA, 30 bp, Artificial Sequence
  Description of Artificial Sequence: Synthetic primer
acgttggatgttccacttttcatccacatg

SEQ ID NO: 342 - DNA, 30 bp, Artificial Sequence
  Description of Artificial Sequence: Synthetic primer
acgttggatggaagcattcctaaaaccttg

SEQ ID NO: 343 - DNA, 30 bp, Artificial Sequence
  Description of Artificial Sequence: Synthetic primer
acgttggatgtcaaacaaaaatagctcagg

SEQ ID NO: 344 - DNA, 30 bp, Artificial Sequence
  Description of Artificial Sequence: Synthetic primer
acgttggatgtgctcacgcataaaacaggg

SEQ ID NO: 345 - DNA, 31 bp, Artificial Sequence
  Description of Artificial Sequence: Synthetic primer
acgttggatggtacagagtgttttgtcatcc

SEQ ID NO: 346 - DNA, 31 bp, Artificial Sequence
  Description of Artificial Sequence: Synthetic primer
acgttggatgctagtttttctctctgcactt

SEQ ID NO: 347 - DNA, 31 bp, Artificial Sequence
  Description of Artificial Sequence: Synthetic primer
acgttggatggatccatgtatatttccaggc

SEQ ID NO: 348 - DNA, 37 bp, Artificial Sequence
  Description of Artificial Sequence: Synthetic primer
ggcgcacgcctccacgcaagagagaactttcaccatg

SEQ ID NO: 349 - DNA, 20 bp, Artificial Sequence
  Description of Artificial Sequence: Synthetic primer
taccagttggaatgtggatc

SEQ ID NO: 350 - DNA, 36 bp, Artificial Sequence
  Description of Artificial Sequence: Synthetic primer
ggcgcacgcctccacgagcacacagcaagaacatcc

SEQ ID NO: 351 - DNA, 30 bp, Artificial Sequence
  Description of Artificial Sequence: Synthetic primer
ggcgcacgccaatgccatgcccacaaaagc

SEQ ID NO: 352 - DNA, 30 bp, Artificial Sequence
  Description of Artificial Sequence: Synthetic primer
acgttggatgcgcaaacaaaaaggacacac

SEQ ID NO: 353 - DNA, 30 bp, Artificial Sequence
  Description of Artificial Sequence: Synthetic primer
acgttggatgctcctttgtttccaccatcc

SEQ ID NO: 354 - DNA, 31 bp, Artificial Sequence
  Description of Artificial Sequence: Synthetic primer
acgttggatggttcagtatatctaggtaagg

SEQ ID NO: 355 - DNA, 30 bp, Artificial Sequence
  Description of Artificial Sequence: Synthetic primer
acgttggatgaaactgagctactgcctctg

SEQ ID NO: 356 - DNA, 36 bp, Artificial Sequence
  Description of Artificial Sequence: Synthetic primer
ggcgcacgcctccacgttccttggtttatatccttg

SEQ ID NO: 357 - DNA, 20 bp, Artificial Sequence
  Description of Artificial Sequence: Synthetic primer
taccaccttggagtgttatc

SEQ ID NO: 358 - DNA, 30 bp, Artificial Sequence
  Description of Artificial Sequence: Synthetic primer
acgttggatgggtagtcatatccctatttc

SEQ ID NO: 359 - DNA, 31 bp, Artificial Sequence
  Description of Artificial Sequence: Synthetic primer
acgttggatggggacaaaatggaaaagaatg

SEQ ID NO: 360 - DNA, 30 bp, Artificial Sequence
  Description of Artificial Sequence: Synthetic primer
acgttggatggaaggacttcagtaagtcac

SEQ ID NO: 361 - DNA, 30 bp, Artificial Sequence
  Description of Artificial Sequence: Synthetic primer
acgttggatgttgatcctaggcaggagtac

SEQ ID NO: 362 - DNA, 30 bp, Artificial Sequence
  Description of Artificial Sequence: Synthetic primer
acgttggatgagattaaaaatcacaagatc

SEQ ID NO: 363 - DNA, 30 bp, Artificial Sequence
  Description of Artificial Sequence: Synthetic primer
acgttggatgtacacttactatgtacttgt

SEQ ID NO: 364 - DNA, 30 bp, Artificial Sequence
  Description of Artificial Sequence: Synthetic primer
acgttggatgacactggaggtgacagtttg

SEQ ID NO: 365 - DNA, 30 bp, Artificial Sequence
  Description of Artificial Sequence: Synthetic primer
acgttggatgaccatagcagcaaataaggg

SEQ ID NO: 366 - DNA, 30 bp, Artificial Sequence
  Description of Artificial Sequence: Synthetic primer
acgttggatgggcattgtggtgctaatctc

SEQ ID NO: 367 - DNA, 30 bp, Artificial Sequence
  Description of Artificial Sequence: Synthetic primer
acgttggatgtaatttttgcctacagttac

SEQ ID NO: 368 - DNA, 31 bp, Artificial Sequence
  Description of Artificial Sequence: Synthetic primer
acgttggatgtagaacacctacaagcatttc

SEQ ID NO: 369 - DNA, 30 bp, Artificial Sequence
  Description of Artificial Sequence: Synthetic primer
acgttggatgtaagttgaatgcacagtgac

SEQ ID NO: 370 - DNA, 31 bp, Artificial Sequence
  Description of Artificial Sequence: Synthetic primer
acgttggatggccccataaacaataatttgg

SEQ ID NO: 371 - DNA, 31 bp, Artificial Sequence
  Description of Artificial Sequence: Synthetic primer
acgttggatgcatctttttctcagtacactc

SEQ ID NO: 372 - DNA, 30 bp, Artificial Sequence
  Description of Artificial Sequence: Synthetic primer
acgttggatgataaatttttggtttatgtc

SEQ ID NO: 373 - DNA, 30 bp, Artificial Sequence
  Description of Artificial Sequence: Synthetic primer
acgttggatgaatgcagatgtcccaagttc

SEQ ID NO: 374 - DNA, 30 bp, Artificial Sequence
  Description of Artificial Sequence: Synthetic primer
acgttggatgcctatgtttggatcctggtc

SEQ ID NO: 375 - DNA, 30 bp, Artificial Sequence
  Description of Artificial Sequence: Synthetic primer
acgttggatgggtgagaaaacttgaagctc

SEQ ID NO: 376 - DNA, 30 bp, Artificial Sequence
  Description of Artificial Sequence: Synthetic primer
acgttggatgcatcgtgaacaagttaggcc

SEQ ID NO: 377 - DNA, 30 bp, Artificial Sequence
  Description of Artificial Sequence: Synthetic primer
acgttggatggcgtaattgttccacaacac

SEQ ID NO: 378 - DNA, 30 bp, Artificial Sequence
  Description of Artificial Sequence: Synthetic primer
acgttggatgtggccagatacatttagaaa

SEQ ID NO: 379 - DNA, 30 bp, Artificial Sequence
  Description of Artificial Sequence: Synthetic primer
acgttggatgtggagaatcaaactcattac

SEQ ID NO: 380 - DNA, 31 bp, Artificial Sequence
  Description of Artificial Sequence: Synthetic primer
acgttggatgcaaaatctgtggagttgaagg

SEQ ID NO: 381 - DNA, 30 bp, Artificial Sequence
  Description of Artificial Sequence: Synthetic primer
acgttggatgcagcctgactttatgctcac

SEQ ID NO: 382 - DNA, 30 bp, Artificial Sequence
  Description of Artificial Sequence: Synthetic primer
acgttggatggtttagtaaaggaaaaccag

SEQ ID NO: 383 - DNA, 30 bp, Artificial Sequence
  Description of Artificial Sequence: Synthetic primer
acgttggatggaaggcttctttggtgtatc

SEQ ID NO: 384 - DNA, 30 bp, Artificial Sequence
  Description of Artificial Sequence: Synthetic primer
acgttggatgataagagtcctgttagctag

SEQ ID NO: 385 - DNA, 30 bp, Artificial Sequence
  Description of Artificial Sequence: Synthetic primer
acgttggatgattgatcagagggtgggaag

SEQ ID NO: 386 - DNA, 30 bp, Artificial Sequence
  Description of Artificial Sequence: Synthetic primer
acgttggatgttccaaggcctttgcttgtc

SEQ ID NO: 387 - DNA, 30 bp, Artificial Sequence
  Description of Artificial Sequence: Synthetic primer
acgttggatgaggcagctaataagctaccc

SEQ ID NO: 388 - DNA, 30 bp, Artificial Sequence
  Description of Artificial Sequence: Synthetic primer
acgttggatggctgtcagcactgaaatgta

SEQ ID NO: 389 - DNA, 31 bp, Artificial Sequence
  Description of Artificial Sequence: Synthetic primer
acgttggatggtaccgaaaggtatctatagg

SEQ ID NO: 390 - DNA, 31 bp, Artificial Sequence
  Description of Artificial Sequence: Synthetic primer
acgttggatggaagaaaaaaatgcttaactc

SEQ ID NO: 391 - DNA, 30 bp, Artificial Sequence
  Description of Artificial Sequence: Synthetic primer
acgttggatggcacaattgtggctgaatac

SEQ ID NO: 392 - DNA, 30 bp, Artificial Sequence
  Description of Artificial Sequence: Synthetic primer
acgttggatgaggtcatcagggtagtactg

SEQ ID NO: 393 - DNA, 30 bp, Artificial Sequence
  Description of Artificial Sequence: Synthetic primer
acgttggatgaagcagaagtggagtgtgag

SEQ ID NO: 394 - DNA, 30 bp, Artificial Sequence
  Description of Artificial Sequence: Synthetic primer
acgttggatgagtagcataattcctctggc

SEQ ID NO: 395 - DNA, 30 bp, Artificial Sequence
  Description of Artificial Sequence: Synthetic primer
acgttggatgccacaaaagaccctaatagc

SEQ ID NO: 396 - DNA, 30 bp, Artificial Sequence
  Description of Artificial Sequence: Synthetic primer
acgttggatgagccagaggaattatgctac

SEQ ID NO: 397 - DNA, 30 bp, Artificial Sequence
  Description of Artificial Sequence: Synthetic primer
acgttggatgccattccatatgtctgtctg

SEQ ID NO: 398 - DNA, 30 bp, Artificial Sequence
  Description of Artificial Sequence: Synthetic primer
acgttggatgtcacttgaatatgggaggcg

SEQ ID NO: 399 - DNA, 30 bp, Artificial Sequence
  Description of Artificial Sequence: Synthetic primer
acgttggatgacagagtctcactctgtccc

SEQ ID NO: 400 - DNA, 30 bp, Artificial Sequence
  Description of Artificial Sequence: Synthetic primer
acgttggatgcatgatgagatagatttaac

SEQ ID NO: 401 - DNA, 30 bp, Artificial Sequence
  Description of Artificial Sequence: Synthetic primer
acgttggatgaaacataggaaaaagtgatg

SEQ ID NO: 402 - DNA, 30 bp, Artificial Sequence
  Description of Artificial Sequence: Synthetic primer
acgttggatgctaaaaagaatcaagtacgc

SEQ ID NO: 403 - DNA, 30 bp, Artificial Sequence
  Description of Artificial Sequence: Synthetic primer
acgttggatgcctgtgaaagtaatgcttgg

SEQ ID NO: 404 - DNA, 31 bp, Artificial Sequence
  Description of Artificial Sequence: Synthetic primer
acgttggatgccacaattatgttgttgaacc

SEQ ID NO: 405 - DNA, 30 bp, Artificial Sequence
  Description of Artificial Sequence: Synthetic primer
acgttggatgtacaccactgcactccagtc

SEQ ID NO: 406 - DNA, 30 bp, Artificial Sequence
  Description of Artificial Sequence: Synthetic primer
acgttggatgggaggaagagtacattaata

SEQ ID NO: 407 - DNA, 30 bp, Artificial Sequence
  Description of Artificial Sequence: Synthetic primer
acgttggatgtgtgctcctgcagaaatgtg

SEQ ID NO: 408 - DNA, 30 bp, Artificial Sequence
  Description of Artificial Sequence: Synthetic primer
acgttggatgccatgcctggcctttaatag

SEQ ID NO: 409 - DNA, 30 bp, Artificial Sequence
  Description of Artificial Sequence: Synthetic primer
acgttggatgaatcctatcatcgatgctac

SEQ ID NO: 410 - DNA, 30 bp, Artificial Sequence
  Description of Artificial Sequence: Synthetic primer
acgttggatgtactaagttcttgaattacc

SEQ ID NO: 411 - DNA, 30 bp, Artificial Sequence
  Description of Artificial Sequence: Synthetic primer
acgttggatgtcgatgataggatttgttgc

SEQ ID NO: 412 - DNA, 30 bp, Artificial Sequence
  Description of Artificial Sequence: Synthetic primer
acgttggatgtggtaggcactacacaattc

SEQ ID NO: 413 - DNA, 31 bp, Artificial Sequence
  Description of Artificial Sequence: Synthetic primer
acgttggatgccaattgttttctagtagact

SEQ ID NO: 414 - DNA, 30 bp, Artificial Sequence
  Description of Artificial Sequence: Synthetic primer
acgttggatgaaaccagtagtggatcagcc

SEQ ID NO: 415 - DNA, 30 bp, Artificial Sequence
  Description of Artificial Sequence: Synthetic primer
acgttggatgatgtacaccagtggtttgcc

SEQ ID NO: 416 - DNA, 30 bp, Artificial Sequence
  Description of Artificial Sequence: Synthetic primer
acgttggatgaacagggctggaattggagg

SEQ ID NO: 417 - DNA, 30 bp, Artificial Sequence
  Description of Artificial Sequence: Synthetic primer
acgttggatgtagctcctacatatggagtg

SEQ ID NO: 418 - DNA, 30 bp, Artificial Sequence
  Description of Artificial Sequence: Synthetic primer
acgttggatgtatggctgtatcaatatcac

SEQ ID NO: 419 - DNA, 30 bp, Artificial Sequence
  Description of Artificial Sequence: Synthetic primer
acgttggatgaatgcaaactgtctaagcac

SEQ ID NO: 420 - DNA, 30 bp, Artificial Sequence
  Description of Artificial Sequence: Synthetic primer
acgttggatggactgtaatcccagctactc

SEQ ID NO: 421 - DNA, 30 bp, Artificial Sequence
  Description of Artificial Sequence: Synthetic primer
acgttggatgtctcagctcactgcactgtc

SEQ ID NO: 422 - DNA, 30 bp, Artificial Sequence
  Description of Artificial Sequence: Synthetic primer
acgttggatgggaaatataccatataaatg

SEQ ID NO: 423 - DNA, 30 bp, Artificial Sequence
  Description of Artificial Sequence: Synthetic primer
acgttggatgagagcaagatgccgtctcag

SEQ ID NO: 424 - DNA, 30 bp, Artificial Sequence
  Description of Artificial Sequence: Synthetic primer
acgttggatgagtacccaggtgttcttagc

SEQ ID NO: 425 - DNA, 30 bp, Artificial Sequence
  Description of Artificial Sequence: Synthetic primer
acgttggatgaagcatgacattatgtttcc

SEQ ID NO: 426 - DNA, 30 bp, Artificial Sequence
  Description of Artificial Sequence: Synthetic primer
acgttggatgcttcacagaagagagtttcc

SEQ ID NO: 427 - DNA, 30 bp, Artificial Sequence
  Description of Artificial Sequence: Synthetic primer
acgttggatggcgttaggtacacatgacac

SEQ ID NO: 428 - DNA, 30 bp, Artificial Sequence
  Description of Artificial Sequence: Synthetic primer
acgttggatgcatctccttgccagcatctc

SEQ ID NO: 429 - DNA, 30 bp, Artificial Sequence
  Description of Artificial Sequence: Synthetic primer
acgttggatgcactagtcatcagggaaatc

SEQ ID NO: 430 - DNA, 17 bp, Artificial Sequence
  Description of Artificial Sequence: Synthetic primer
ctgaggcctgcccctga

SEQ ID NO: 431 - DNA, 24 bp, Artificial Sequence
  Description of Artificial Sequence: Synthetic primer
ttaaggcatctctgtatatactaa

SEQ ID NO: 432 - DNA, 17 bp, Artificial Sequence
  Description of Artificial Sequence: Synthetic primer
cagatgctggagaggat

SEQ ID NO: 433 - DNA, 19 bp, Artificial Sequence
  Description of Artificial Sequence: Synthetic primer
gacagcttcagatatttca

SEQ ID NO: 434 - DNA, 21 bp, Artificial Sequence
  Description of Artificial Sequence: Synthetic primer
catgcccaattcatatagata

SEQ ID NO: 435 - DNA, 17 bp, Artificial Sequence
  Description of Artificial Sequence: Synthetic primer
tctgtcttgttcccatc

SEQ ID NO: 436 - DNA, 18 bp, Artificial Sequence
  Description of Artificial Sequence: Synthetic primer
cagatgaggtttctgaag

SEQ ID NO: 437 - DNA, 19 bp, Artificial Sequence
  Description of Artificial Sequence: Synthetic primer
aaggactatagggctacta

SEQ ID NO: 438 - DNA, 20 bp, Artificial Sequence
  Description of Artificial Sequence: Synthetic primer
catgcctacctgttaatatg

SEQ ID NO: 439 - DNA, 20 bp, Artificial Sequence
  Description of Artificial Sequence: Synthetic primer
gaattctaaggctactacga

SEQ ID NO: 440 - DNA, 18 bp, Artificial Sequence
  Description of Artificial Sequence: Synthetic primer
aagaagtggtctactgtc

SEQ ID NO: 441 - DNA, 18 bp, Artificial Sequence
  Description of Artificial Sequence: Synthetic primer
gaacgccttatctaagca

SEQ ID NO: 442 - DNA, 18 bp, Artificial Sequence
  Description of Artificial Sequence: Synthetic primer
aggatatttgcaaacgtg

SEQ ID NO: 443 - DNA, 20 bp, Artificial Sequence
  Description of Artificial Sequence: Synthetic primer
tgcaaggtcaaaatattctt

SEQ ID NO: 444 - DNA, 23 bp, Artificial Sequence
  Description of Artificial Sequence: Synthetic primer
gatgctttaaaacaaaaactaca

SEQ ID NO: 445 - DNA, 21 bp, Artificial Sequence
  Description of Artificial Sequence: Synthetic primer
ccataatatttcacccattct

SEQ ID NO: 446 - DNA, 20 bp, Artificial Sequence
  Description of Artificial Sequence: Synthetic primer
aaaatagctcaggtttttca

SEQ ID NO: 447 - DNA, 18 bp, Artificial Sequence
  Description of Artificial Sequence: Synthetic primer
acattaagtggatgaggt

SEQ ID NO: 448 - DNA, 17 bp, Artificial Sequence
  Description of Artificial Sequence: Synthetic primer
tatttccaggcacttca

SEQ ID NO: 449 - DNA, 18 bp, Artificial Sequence
  Description of Artificial Sequence: Synthetic primer
gaatgtggatcagtgttt

SEQ ID NO: 450 - DNA, 20 bp, Artificial Sequence
  Description of Artificial Sequence: Synthetic primer
agacaatctctaaaaattaa

SEQ ID NO: 451 - DNA, 19 bp, Artificial Sequence
  Description of Artificial Sequence: Synthetic primer
catccatccaacctggctc

SEQ ID NO: 452 - DNA, 18 bp, Artificial Sequence
  Description of Artificial Sequence: Synthetic primer
cctctgtgggataaaaca

SEQ ID NO: 453 - DNA, 18 bp, Artificial Sequence
  Description of Artificial Sequence: Synthetic primer
gagtgttatcgaggtgag

SEQ ID NO: 454 - DNA, 21 bp, Artificial Sequence
  Description of Artificial Sequence: Synthetic primer
tgagtaagttgcaattacaaa

SEQ ID NO: 455 - DNA, 20 bp, Artificial Sequence
  Description of Artificial Sequence: Synthetic primer
caggagtactctagattagt

SEQ ID NO: 456 - DNA, 23 bp, Artificial Sequence
  Description of Artificial Sequence: Synthetic primer
caaataatcatgaaattggtagc

SEQ ID NO: 457 - DNA, 19 bp, Artificial Sequence
  Description of Artificial Sequence: Synthetic primer
aaataagggaaaggaagtc

SEQ ID NO: 458 - DNA, 20 bp, Artificial Sequence
  Description of Artificial Sequence: Synthetic primer
ttgcctacagttacttatct

SEQ ID NO: 459 - DNA, 17 bp, Artificial Sequence
  Description of Artificial Sequence: Synthetic primer
gtagttttctttgccct

SEQ ID NO: 460 - DNA, 22 bp, Artificial Sequence
  Description of Artificial Sequence: Synthetic primer
caatgttttagttttgcttttc

SEQ ID NO: 461 - DNA, 23 bp, Artificial Sequence
  Description of Artificial Sequence: Synthetic primer
tttggttcatcaattgtaaaata

SEQ ID NO: 462 - DNA, 20 bp, Artificial Sequence
  Description of Artificial Sequence: Synthetic primer
gaagctcagaaaaattaagg

SEQ ID NO: 463 - DNA, 17 bp, Artificial Sequence
  Description of Artificial Sequence: Synthetic primer
ttccacaacactcactt

SEQ ID NO: 464 - DNA, 22 bp, Artificial Sequence
  Description of Artificial Sequence: Synthetic primer
cattttaacttttgtccaatca

SEQ ID NO: 465 - DNA, 17 bp, Artificial Sequence
  Description of Artificial Sequence: Synthetic primer
taagaatccccctgttt

SEQ ID NO: 466 - DNA, 23 bp, Artificial Sequence
  Description of Artificial Sequence: Synthetic primer
ggtgtatctactttcataaaatt

SEQ ID NO: 467 - DNA, 17 bp, Artificial Sequence
  Description of Artificial Sequence: Synthetic primer
agggtgggaagaaaaaa

SEQ ID NO: 468 - DNA, 20 bp, Artificial Sequence
  Description of Artificial Sequence: Synthetic primer
ggtctttcttttaatcacac

SEQ ID NO: 469 - DNA, 24 bp, Artificial Sequence
  Description of Artificial Sequence: Synthetic primer
cgaaaggtatctataggtttaata

SEQ ID NO: 470 - DNA, 22 bp, Artificial Sequence
  Description of Artificial Sequence: Synthetic primer
aacaaatatttgagaaaactgc

SEQ ID NO: 471 - DNA, 17 bp, Artificial Sequence
  Description of Artificial Sequence: Synthetic primer
tgtgcagaaggttgaca

SEQ ID NO: 472 - DNA, 21 bp, Artificial Sequence
  Description of Artificial Sequence: Synthetic primer
cctaatagccaaagcaatttt

SEQ ID NO: 473 - DNA, 20 bp, Artificial Sequence
  Description of Artificial Sequence: Synthetic primer
catatgtctgtctgctttta

SEQ ID NO: 474 - DNA, 17 bp, Artificial Sequence
  Description of Artificial Sequence: Synthetic primer
cagtggtgtgatctctg

SEQ ID NO: 475 - DNA, 23 bp, Artificial Sequence
  Description of Artificial Sequence: Synthetic primer
caatggatttaacaaatttgtag

SEQ ID NO: 476 - DNA, 17 bp, Artificial Sequence
  Description of Artificial Sequence: Synthetic primer
atgcttggagccatttc

SEQ ID NO: 477 - DNA, 17 bp, Artificial Sequence
  Description of Artificial Sequence: Synthetic primer
gacagagtgggacctgt

SEQ ID NO: 478 - DNA, 18 bp, Artificial Sequence
  Description of Artificial Sequence: Synthetic primer
tgcagaaatgtgacaatg

SEQ ID NO: 479 - DNA, 21 bp, Artificial Sequence
  Description of Artificial Sequence: Synthetic primer
gatgctacatattcagcaaaa

SEQ ID NO: 480 - DNA, 21 bp, Artificial Sequence
  Description of Artificial Sequence: Synthetic primer
caaagtcttttgcttaatagg

SEQ ID NO: 481 - DNA, 23 bp, Artificial Sequence
  Description of Artificial Sequence: Synthetic primer
acaccataaaatgttagacataa

SEQ ID NO: 482 - DNA, 17 bp, Artificial Sequence
  Description of Artificial Sequence: Synthetic primer
ctgctggcttcctactt

SEQ ID NO: 483 - DNA, 20 bp, Artificial Sequence
  Description of Artificial Sequence: Synthetic primer
ctacatatggagtgagaaca

SEQ ID NO: 484 - DNA, 20 bp, Artificial Sequence
  Description of Artificial Sequence: Synthetic primer
aactgtctaagcactctaaa

SEQ ID NO: 485 - DNA, 17 bp, Artificial Sequence
  Description of Artificial Sequence: Synthetic primer
tctgcctccctggttca

SEQ ID NO: 486 - DNA, 21 bp, Artificial Sequence
  Description of Artificial Sequence: Synthetic primer
acaaacaaacaaacaaaaaac

SEQ ID NO: 487 - DNA, 19 bp, Artificial Sequence
  Description of Artificial Sequence: Synthetic primer
ttttgccaactattatccc

SEQ ID NO: 488 - DNA, 17 bp, Artificial Sequence
  Description of Artificial Sequence: Synthetic primer
catgacacagaccacat

SEQ ID NO: 489 - DNA, 21 bp, Artificial Sequence
  Description of Artificial Sequence: Synthetic primer
gaaatccaaattaaaaccaca

SEQ ID NO: 490 - DNA, 36 bp, Artificial Sequence
  Description of Artificial Sequence: Synthetic primer
ggcgcacgcctccacgtcctgagaccgttgctagag

SEQ ID NO: 491 - DNA, 29 bp, Artificial Sequence
  Description of Artificial Sequence: Synthetic primer
ggcgcacgccttggctggcgcccggaaaa

SEQ ID NO: 492 - DNA, 30 bp, Artificial Sequence
  Description of Artificial Sequence: Synthetic primer
acgttggatgattagctagctactcctggg

SEQ ID NO: 493 - DNA, 30 bp, Artificial Sequence
  Description of Artificial Sequence: Synthetic primer
acgttggatggtttgctggactgtcacttc

SEQ ID NO: 494 - DNA, 30 bp, Artificial Sequence
  Description of Artificial Sequence: Synthetic primer
acgttggatgccagctttgcaaatcaattc

SEQ ID NO: 495 - DNA, 30 bp, Artificial Sequence
  Description of Artificial Sequence: Synthetic primer
acgttggatggaagggatctttgggttgtg

SEQ ID NO: 496 - DNA, 30 bp, Artificial Sequence
  Description of Artificial Sequence: Synthetic primer
acgttggatgaaaggagttaccccttggag

SEQ ID NO: 497 - DNA, 30 bp, Artificial Sequence
  Description of Artificial Sequence: Synthetic primer
acgttggatgactgaccataaagcgcgtac

SEQ ID NO: 498 - DNA, 30 bp, Artificial Sequence
  Description of Artificial Sequence: Synthetic primer
acgttggatgactgataaggtccaaaggag

SEQ ID NO: 499 - DNA, 31 bp, Artificial Sequence
  Description of Artificial Sequence: Synthetic primer
acgttggatgccttgaaaaacttccagaatg

SEQ ID NO: 500 - DNA, 30 bp, Artificial Sequence
  Description of Artificial Sequence: Synthetic primer
acgttggatgaggagaatggcctgaacctg

SEQ ID NO: 501 - DNA, 30 bp, Artificial Sequence
  Description of Artificial Sequence: Synthetic primer
acgttggatggaaggagtcttgctctgttg

SEQ ID NO: 502 - DNA, 36 bp, Artificial Sequence
  Description of Artificial Sequence: Synthetic primer
ggcgcacgcctccacgtactagacttttgccagtac

SEQ ID NO: 503 - DNA, 30 bp, Artificial Sequence
  Description of Artificial Sequence: Synthetic primer
ggcgcacgcctttttaagcattgtggcctc

SEQ ID NO: 504 - DNA, 30 bp, Artificial Sequence
  Description of Artificial Sequence: Synthetic primer
acgttggatgcaaaggttttcatgtaacca

SEQ ID NO: 505 - DNA, 30 bp, Artificial Sequence
  Description of Artificial Sequence: Synthetic primer
acgttggatggaaaagtaggaaggacatgg

SEQ ID NO: 506 - DNA, 31 bp, Artificial Sequence
  Description of Artificial Sequence: Synthetic primer
acgttggatgcctggtatctaatttaatttt

SEQ ID NO: 507 - DNA, 31 bp, Artificial Sequence
  Description of Artificial Sequence: Synthetic primer
acgttggatgctggtttgaagcctaaaaatg

SEQ ID NO: 508 - DNA, 30 bp, Artificial Sequence
  Description of Artificial Sequence: Synthetic primer
acgttggatgtaccagcatcaccacttgag

SEQ ID NO: 509 - DNA, 30 bp, Artificial Sequence
  Description of Artificial Sequence: Synthetic primer
acgttggatgtcacctagtgatgttggagc

SEQ ID NO: 510 - DNA, 32 bp, Artificial Sequence
  Description of Artificial Sequence: Synthetic primer
acgttggatgctaatgctaaaatacttgcttc

SEQ ID NO: 511 - DNA, 30 bp, Artificial Sequence
  Description of Artificial Sequence: Synthetic primer
acgttggatggggacaacctatgtatatgc

SEQ ID NO: 512 - DNA, 30 bp, Artificial Sequence; identical to SEQ ID NO: 148
  Description of Artificial Sequence: Synthetic primer

SEQ ID NO: 513 - DNA, 30 bp, Artificial Sequence
  Description of Artificial Sequence: Synthetic primer
acgttggatgataccaacactttgggaggc

SEQ ID NO: 514 - DNA, 30 bp, Artificial Sequence
  Description of Artificial Sequence: Synthetic primer
acgttggatgctcaaaaaggcaaagtgtac

SEQ ID NO: 515 - DNA, 30 bp, Artificial Sequence
  Description of Artificial Sequence: Synthetic primer
acgttggatgcagggaacaaatttttctag

SEQ ID NO: 516 - DNA, 30 bp, Artificial Sequence
  Description of Artificial Sequence: Synthetic primer
acgttggatgcataacttgagattctagcc

SEQ ID NO: 517 - DNA, 30 bp, Artificial Sequence
  Description of Artificial Sequence: Synthetic primer
acgttggatgagaagcaggcaggaaaatgg

SEQ ID NO: 518 - DNA, 36 bp, Artificial Sequence
  Description of Artificial Sequence: Synthetic primer
ggcgcacgcctccacgctccttgggaaaaactttgg

SEQ ID NO: 519 - DNA, 30 bp, Artificial Sequence
  Description of Artificial Sequence: Synthetic primer
ggcgcacgccagtctgtgctactttatgtc

SEQ ID NO: 520 - DNA, 30 bp, Artificial Sequence
  Description of Artificial Sequence: Synthetic primer
acgttggatgttcagacaggtcacttctgg

SEQ ID NO: 521 - DNA, 31 bp, Artificial Sequence
  Description of Artificial Sequence: Synthetic primer
acgttggatggtcagaaagagatttctcaca

SEQ ID NO: 522 - DNA, 31 bp, Artificial Sequence
  Description of Artificial Sequence: Synthetic primer
acgttggatggctcaatactgtattttaacc

SEQ ID NO: 523 - DNA, 30 bp, Artificial Sequence
  Description of Artificial Sequence: Synthetic primer
acgttggatgcaaagcaaccagaatccatg

SEQ ID NO: 524 - DNA, 36 bp, Artificial Sequence
  Description of Artificial Sequence: Synthetic primer
ggcgcacgcctccacggaccaagttcacatgtgagc

SEQ ID NO: 525 - DNA, 30 bp, Artificial Sequence
  Description of Artificial Sequence: Synthetic primer
ggcgcacgcccccagaaaacagaatgtgcc

SEQ ID NO: 526 - DNA, 36 bp, Artificial Sequence
  Description of Artificial Sequence: Synthetic primer
ggcgcacgcctccacgcccagaaaacagaatgtgcc

SEQ ID NO: 527 - DNA, 30 bp, Artificial Sequence
  Description of Artificial Sequence: Synthetic primer
ggcgcacgccgaccaagttcacatgtgagc

SEQ ID NO: 528 - DNA, 36 bp, Artificial Sequence
  Description of Artificial Sequence: Synthetic primer
ggcgcacgcctccacggacctacatggataagtttg

SEQ ID NO: 529 - DNA, 20 bp, Artificial Sequence
  Description of Artificial Sequence: Synthetic primer
atagcaggcttttacacacc

SEQ ID NO: 530 - DNA, 30 bp, Artificial Sequence
  Description of Artificial Sequence: Synthetic primer
acgttggatgctgccttctgtcacatatag

SEQ ID NO: 531 - DNA, 30 bp, Artificial Sequence
  Description of Artificial Sequence: Synthetic primer
acgttggatgcaagtccagacggcatcatg

SEQ ID NO: 532 - DNA, 31 bp, Artificial Sequence
  Description of Artificial Sequence: Synthetic primer
acgttggatgcaatcagttacttgcatgcac

SEQ ID NO: 533 - DNA, 30 bp, Artificial Sequence
  Description of Artificial Sequence: Synthetic primer
acgttggatgatcacctacctgcacatcag

SEQ ID NO: 534 - DNA, 30 bp, Artificial Sequence
  Description of Artificial Sequence: Synthetic primer
acgttggatgaggctttctgcaactttgcg

SEQ ID NO: 535 - DNA, 30 bp, Artificial Sequence
  Description of Artificial Sequence: Synthetic primer
acgttggatgcaatgccttattgtgtgcag

SEQ ID NO: 536 - DNA, 30 bp, Artificial Sequence
  Description of Artificial Sequence: Synthetic primer
acgttggatgttcaatgcctcatacacccc

SEQ ID NO: 537 - DNA, 30 bp, Artificial Sequence
  Description of Artificial Sequence: Synthetic primer
acgttggatgacgcaaagttgcagaaagcc

SEQ ID NO: 538 - DNA, 30 bp, Artificial Sequence
  Description of Artificial Sequence: Synthetic primer
acgttggatgctgtgctctgatatgtatcc

SEQ ID NO: 539 - DNA, 30 bp, Artificial Sequence
  Description of Artificial Sequence: Synthetic primer
acgttggatgctgaatcattggagctaggg

SEQ ID NO: 540 - DNA, 30 bp, Artificial Sequence
  Description of Artificial Sequence: Synthetic primer
acgttggatgttctcctcatcttcctcacc

SEQ ID NO: 541 - DNA, 30 bp, Artificial Sequence
  Description of Artificial Sequence: Synthetic primer
acgttggatgaggagtgaatgtggatagag

SEQ ID NO: 542 - DNA, 30 bp, Artificial Sequence
  Description of Artificial Sequence: Synthetic primer
acgttggatgaagccagcaggattatgaag

SEQ ID NO: 543 - DNA, 31 bp, Artificial Sequence
  Description of Artificial Sequence: Synthetic primer
acgttggatgctctgttattggaaaaaattc

SEQ ID NO: 544 - DNA, 30 bp, Artificial Sequence
  Description of Artificial Sequence: Synthetic primer
acgttggatgcccccacaaattctgtaacg

SEQ ID NO: 545 - DNA, 30 bp, Artificial Sequence
  Description of Artificial Sequence: Synthetic primer
acgttggatgaatgaaagtacactctacag

SEQ ID NO: 546 - DNA, 30 bp, Artificial Sequence
  Description of Artificial Sequence: Synthetic primer
acgttggatggcactggacacctgttattc

SEQ ID NO: 547 - DNA, 30 bp, Artificial Sequence
  Description of Artificial Sequence: Synthetic primer
acgttggatggcacaaaatataccatcgtc

SEQ ID NO: 548 - DNA, 36 bp, Artificial Sequence
  Description of Artificial Sequence: Synthetic primer
ggcgcacgcctccacgcttctctggtctcctgatag

SEQ ID NO: 549 - DNA, 30 bp, Artificial Sequence
  Description of Artificial Sequence: Synthetic primer
ggcgcacgccgtttcccatggcctaagatg

SEQ ID NO: 550 - DNA, 36 bp, Artificial Sequence
  Description of Artificial Sequence: Synthetic primer
ggcgcacgcctccacgaagcctcccaaaaatatgcc

SEQ ID NO: 551 - DNA, 30 bp, Artificial Sequence
  Description of Artificial Sequence: Synthetic primer
ggcgcacgccttggtttgggataaaggagg

SEQ ID NO: 552 - DNA, 36 bp, Artificial Sequence
  Description of Artificial Sequence: Synthetic primer
ggcgcacgcctccacgttggtttgggataaaggagg

SEQ ID NO: 553 - DNA, 31 bp, Artificial Sequence
  Description of Artificial Sequence: Synthetic primer
ggcgcacgcccctaataatctaaagcctccc

SEQ ID NO: 554 - DNA, 36 bp, Artificial Sequence
  Description of Artificial Sequence: Synthetic primer
ggcgcacgcctccacgcacactacactttgactggg

SEQ ID NO: 555 - DNA, 30 bp, Artificial Sequence
  Description of Artificial Sequence: Synthetic primer
ggcgcacgccatctcttagtttggtacgcg

SEQ ID NO: 556 - DNA, 30 bp, Artificial Sequence
  Description of Artificial Sequence: Synthetic primer
acgttggatggtttatttactttgaacctg

SEQ ID NO: 557 - DNA, 30 bp, Artificial Sequence
  Description of Artificial Sequence: Synthetic primer
acgttggatgtcatttccaagaaatatgtg

SEQ ID NO: 558 - DNA, 30 bp, Artificial Sequence
  Description of Artificial Sequence: Synthetic primer
acgttggatgtaaaaatcttagacagtggg

SEQ ID NO: 559 - DNA, 30 bp, Artificial Sequence
  Description of Artificial Sequence: Synthetic primer
acgttggatgtctaaattgtgtccagactc

SEQ ID NO: 560 - DNA, 36 bp, Artificial Sequence
  Description of Artificial Sequence: Synthetic primer
ggcgcacgcctccacgcaagacttgtaatcaaatcc

SEQ ID NO: 561 - DNA, 30 bp, Artificial Sequence
  Description of Artificial Sequence: Synthetic primer
ggcgcacgccttctaactgtggtgtttctg

SEQ ID NO: 562 - DNA, 36 bp, Artificial Sequence
  Description of Artificial Sequence: Synthetic primer
ggcgcacgcctccacgttactggtacgggaagaatg

SEQ ID NO: 563 - DNA, 30 bp, Artificial Sequence
  Description of Artificial Sequence: Synthetic primer
ggcgcacgccggaaattgtacatgcaaagg

SEQ ID NO: 564 - DNA, 30 bp, Artificial Sequence
  Description of Artificial Sequence: Synthetic primer
acgttggatgaacaagagcgaaaccctgtc

SEQ ID NO: 565 - DNA, 30 bp, Artificial Sequence
  Description of Artificial Sequence: Synthetic primer
acgttggatgataaaccaagaggcatggtg

SEQ ID NO: 566 - DNA, 30 bp, Artificial Sequence
  Description of Artificial Sequence: Synthetic primer
acgttggatgtgtgggagaattcaactgag

SEQ ID NO: 567 - DNA, 30 bp, Artificial Sequence
  Description of Artificial Sequence: Synthetic primer
acgttggatgagctttggctttcaaaggtg

SEQ ID NO: 568 - DNA, 30 bp, Artificial Sequence
  Description of Artificial Sequence: Synthetic primer
acgttggatgttcctccatatgtggaaaac

SEQ ID NO: 569 - DNA, 30 bp, Artificial Sequence
  Description of Artificial Sequence: Synthetic primer
acgttggatgtcttatttctaatatctcgg

SEQ ID NO: 570 - DNA, 30 bp, Artificial Sequence
  Description of Artificial Sequence: Synthetic primer
acgttggatgcaaacaactctctttttgaa

SEQ ID NO: 571 - DNA, 30 bp, Artificial Sequence
  Description of Artificial Sequence: Synthetic primer
acgttggatgggaagccttacctctgaaac

SEQ ID NO: 572 - DNA, 30 bp, Artificial Sequence
  Description of Artificial Sequence: Synthetic primer
acgttggatgatggaaggtgcatgaaagag

SEQ ID NO: 573 - DNA, 30 bp, Artificial Sequence
  Description of Artificial Sequence: Synthetic primer
acgttggatgcagttctgaccatgtgactc

SEQ ID NO: 574 - DNA, 36 bp, Artificial Sequence
  Description of Artificial Sequence: Synthetic primer
ggcgcacgcctccacggcaaaatgtagacacagatc

SEQ ID NO: 575 - DNA, 30 bp, Artificial Sequence
  Description of Artificial Sequence: Synthetic primer
ggcgcacgcctcgaatgggttcttcattac

SEQ ID NO: 576 - DNA, 30 bp, Artificial Sequence
  Description of Artificial Sequence: Synthetic primer
acgttggatgtatgtctgaggttctacggg

SEQ ID NO: 577 - DNA, 30 bp, Artificial Sequence
  Description of Artificial Sequence: Synthetic primer
acgttggatgctttgtataagtgtcttcag

SEQ ID NO: 578 - DNA, 30 bp, Artificial Sequence
  Description of Artificial Sequence: Synthetic primer
acgttggatgaatggcgtgaatccaggagg

SEQ ID NO: 579 - DNA, 30 bp, Artificial Sequence
  Description of Artificial Sequence: Synthetic primer
acgttggatgtttttcagacggagtctcgc

SEQ ID NO: 580 - DNA, 30 bp, Artificial Sequence
  Description of Artificial Sequence: Synthetic primer
acgttggatgtggatcacaaaactgcacac

SEQ ID NO: 581 - DNA, 30 bp, Artificial Sequence
  Description of Artificial Sequence: Synthetic primer
acgttggatgcccaaaggttactttctttc

SEQ ID NO: 582 - DNA, 36 bp, Artificial Sequence
  Description of Artificial Sequence: Synthetic primer
ggcgcacgcctccacgccattcaataagtctggcac

SEQ ID NO: 583 - DNA, 30 bp, Artificial Sequence
  Description of Artificial Sequence: Synthetic primer
ggcgcacgccaacctgaagtgagccttaag

SEQ ID NO: 584 - DNA, 36 bp, Artificial Sequence
  Description of Artificial Sequence: Synthetic primer
ggcgcacgcctccacgtttgagtctctccactgttg

SEQ ID NO: 585 - DNA, 30 bp, Artificial Sequence
  Description of Artificial Sequence: Synthetic primer
ggcgcacgcccagaactgcacatgagattc

SEQ ID NO: 586 - DNA, 30 bp, Artificial Sequence
  Description of Artificial Sequence: Synthetic primer
acgttggatgttgctggacaatagaaagac

SEQ ID NO: 587 - DNA, 30 bp, Artificial Sequence
  Description of Artificial Sequence: Synthetic primer
acgttggatggtgactggaaactgagaatg

SEQ ID NO: 588 - DNA, 30 bp, Artificial Sequence
  Description of Artificial Sequence: Synthetic primer
acgttggatgtgtgatcttgctggcttcag

SEQ ID NO: 589 - DNA, 30 bp, Artificial Sequence
  Description of Artificial Sequence: Synthetic primer
acgttggatgtgcttctcactctttgggtc

SEQ ID NO: 590 - DNA, 30 bp, Artificial Sequence
  Description of Artificial Sequence: Synthetic primer
acgttggatgtggtccgttttacagagagc

SEQ ID NO: 591 - DNA, 30 bp, Artificial Sequence
  Description of Artificial Sequence: Synthetic primer
acgttggatgtgtgtctagctcagggattg

SEQ ID NO: 592 - DNA, 31 bp, Artificial Sequence
  Description of Artificial Sequence: Synthetic primer
acgttggatgtcagcaggccatagctgcctc

SEQ ID NO: 593 - DNA, 30 bp, Artificial Sequence
  Description of Artificial Sequence: Synthetic primer
acgttggatgatgcaagagcccatggcagg

SEQ ID NO: 594 - DNA, 30 bp, Artificial Sequence
  Description of Artificial Sequence: Synthetic primer
acgttggatgaagactgaagtggcaacagg

SEQ ID NO: 595 - DNA, 30 bp, Artificial Sequence
  Description of Artificial Sequence: Synthetic primer
acgttggatgttgcattttgtcccatttcc

SEQ ID NO: 596 - DNA, 31 bp, Artificial Sequence
  Description of Artificial Sequence: Synthetic primer
acgttggatggtccaatctgctgttttcaac

SEQ ID NO: 597 - DNA, 30 bp, Artificial Sequence
  Description of Artificial Sequence: Synthetic primer
acgttggatgattgatatatgaagaaacag

SEQ ID NO: 598 - DNA, 36 bp, Artificial Sequence
  Description of Artificial Sequence: Synthetic primer
ggcgcacgcctccacgggcaatggatgacaatagta

SEQ ID NO: 599 - DNA, 30 bp, Artificial Sequence
  Description of Artificial Sequence: Synthetic primer
ggcgcacgcctctacttttgcattgcttcc

SEQ ID NO: 600 - DNA, 30 bp, Artificial Sequence
  Description of Artificial Sequence: Synthetic primer
acgttggatgaggtggtggtaaaagaaggg

SEQ ID NO: 601 - DNA, 30 bp, Artificial Sequence
  Description of Artificial Sequence: Synthetic primer
acgttggatggagctccagaggaaaaattg

SEQ ID NO: 602 - DNA, 36 bp, Artificial Sequence
  Description of Artificial Sequence: Synthetic primer
ggcgcacgcctccacgtggaagaatgaggcttagac

SEQ ID NO: 603 - DNA, 30 bp, Artificial Sequence
  Description of Artificial Sequence: Synthetic primer
ggcgcacgcctgggagatctattctacctc

SEQ ID NO: 604 - DNA, 36 bp, Artificial Sequence
  Description of Artificial Sequence: Synthetic primer
ggcgcacgcctccacgtaaggtggttacaattactc

SEQ ID NO: 605 - DNA, 30 bp, Artificial Sequence
  Description of Artificial Sequence: Synthetic primer
ggcgcacgccaatgactatgtgcactggag

SEQ ID NO: 606 - DNA, 36 bp, Artificial Sequence
  Description of Artificial Sequence: Synthetic primer
ggcgcacgcctccacgttgagatgccattgataggc

SEQ ID NO: 607 - DNA, 30 bp, Artificial Sequence
  Description of Artificial Sequence: Synthetic primer
ggcgcacgccaatgcatctttggtcctgac

SEQ ID NO: 608 - DNA, 36 bp, Artificial Sequence
  Description of Artificial Sequence: Synthetic primer
ggcgcacgcctccacgctaagctgctttcccattcc

SEQ ID NO: 609 - DNA, 30 bp, Artificial Sequence
  Description of Artificial Sequence: Synthetic primer
ggcgcacgccgaagtcaggaccaaagatgc

SEQ ID NO: 610 - DNA, 30 bp, Artificial Sequence
  Description of Artificial Sequence: Synthetic primer
acgttggatgcttcccgtttttctacctgc

SEQ ID NO: 611 - DNA, 31 bp, Artificial Sequence
  Description of Artificial Sequence: Synthetic primer
acgttggatggagccaatgaaagaagaaagg

SEQ ID NO: 612 - DNA, 36 bp, Artificial Sequence
  Description of Artificial Sequence: Synthetic primer
ggcgcacgcctccacgctcagatggtggaaagtagg

SEQ ID NO: 613 - DNA, 30 bp, Artificial Sequence
  Description of Artificial Sequence: Synthetic primer
ggcgcacgcctcttgttcaagcggtagagg

SEQ ID NO: 614 - DNA, 36 bp, Artificial Sequence
  Description of Artificial Sequence: Synthetic primer
ggcgcacgcctccacgcctctgtatatctagctacc

SEQ ID NO: 615 - DNA, 30 bp, Artificial Sequence
  Description of Artificial Sequence: Synthetic primer
ggcgcacgccgctttggatagtcaattcag

SEQ ID NO: 616 - DNA, 36 bp, Artificial Sequence
  Description of Artificial Sequence: Synthetic primer
ggcgcacgcctccacgctaccttcacatctgtagtc

SEQ ID NO: 617 - DNA, 30 bp, Artificial Sequence
  Description of Artificial Sequence: Synthetic primer
ggcgcacgcctcttgtgggtataagctgtg

SEQ ID NO: 618 - DNA, 36 bp, Artificial Sequence
  Description of Artificial Sequence: Synthetic primer
ggcgcacgcctccacgttggagaggaaactaaagcg

SEQ ID NO: 619 - DNA, 31 bp, Artificial Sequence
  Description of Artificial Sequence: Synthetic primer
ggcgcacgcccatccaaatgtttcagtagag

SEQ ID NO: 620 - DNA, 30 bp, Artificial Sequence
  Description of Artificial Sequence: Synthetic primer
acgttggatgcaccacgcccagctaatttt

SEQ ID NO: 621 - DNA, 30 bp, Artificial Sequence
  Description of Artificial Sequence: Synthetic primer
acgttggatggtcaggagatcaagaccatc

SEQ ID NO: 622 - DNA, 30 bp, Artificial Sequence
  Description of Artificial Sequence: Synthetic primer
acgttggatgcaggtctttggcatagactc

SEQ ID NO: 623 - DNA, 30 bp, Artificial Sequence
  Description of Artificial Sequence: Synthetic primer
acgttggatgagcttttcttgcttatgctc

SEQ ID NO: 624 - DNA, 30 bp, Artificial Sequence
  Description of Artificial Sequence: Synthetic primer
acgttggatggccctggaaaatgatggaag

SEQ ID NO: 625 - DNA, 31 bp, Artificial Sequence
  Description of Artificial Sequence: Synthetic primer
acgttggatggggatttctcatatcaggttg

SEQ ID NO: 626 - DNA, 31 bp, Artificial Sequence
  Description of Artificial Sequence: Synthetic primer
acgttggatggtgtatatacattatctacat

SEQ ID NO: 627 - DNA, 30 bp, Artificial Sequence
  Description of Artificial Sequence: Synthetic primer
acgttggatggcactgaatttgcttccaac

SEQ ID NO: 628 - DNA, 36 bp, Artificial Sequence
  Description of Artificial Sequence: Synthetic primer
ggcgcacgcctccacgaaacctctgagctcactatg

SEQ ID NO: 629 - DNA, 31 bp, Artificial Sequence
  Description of Artificial Sequence: Synthetic primer
ggcgcacgccgtattcctaattaaggggaag

SEQ ID NO: 630 - DNA, 30 bp, Artificial Sequence
  Description of Artificial Sequence: Synthetic primer
acgttggatgcaccctgggaaactataaac

SEQ ID NO: 631 - DNA, 31 bp, Artificial Sequence
  Description of Artificial Sequence: Synthetic primer
acgttggatggtagttctataaggttttgcc

SEQ ID NO: 632 - DNA, 36 bp, Artificial Sequence; identical to SEQ ID NO: 490
  Description of Artificial Sequence: Synthetic primer

SEQ ID NO: 633 - DNA, 29 bp, Artificial Sequence
  Description of Artificial Sequence: Synthetic primer
ggcgcacgccttggctggcgcccggaaaa

SEQ ID NO: 634 - DNA, 30 bp, Artificial Sequence; identical to SEQ ID NO: 492
  Description of Artificial Sequence: Synthetic primer

SEQ ID NO: 635 - DNA, 30 bp, Artificial Sequence; identical to SEQ ID NO: 493
  Description of Artificial Sequence: Synthetic primer

SEQ ID NO: 636 - DNA, 30 bp, Artificial Sequence; identical to SEQ ID NO: 494
  Description of Artificial Sequence: Synthetic primer

SEQ ID NO: 637 - DNA, 30 bp, Artificial Sequence; identical to SEQ ID NO: 495
  Description of Artificial Sequence: Synthetic primer

SEQ ID NO: 638 - DNA, 30 bp, Artificial Sequence; identical to SEQ ID NO: 496
  Description of Artificial Sequence: Synthetic primer

SEQ ID NO: 639 - DNA, 30 bp, Artificial Sequence; identical to SEQ ID NO: 497
  Description of Artificial Sequence: Synthetic primer

SEQ ID NO: 640 - DNA, 30 bp, Artificial Sequence; identical to SEQ ID NO: 498
  Description of Artificial Sequence: Synthetic primer

SEQ ID NO: 641 - DNA, 31 bp, Artificial Sequence; identical to SEQ ID NO: 499
  Description of Artificial Sequence: Synthetic primer

SEQ ID NO: 642 - DNA, 30 bp, Artificial Sequence; identical to SEQ ID NO: 500
  Description of Artificial Sequence: Synthetic primer

SEQ ID NO: 643 - DNA, 30 bp, Artificial Sequence; identical to SEQ ID NO: 501
  Description of Artificial Sequence: Synthetic primer

SEQ ID NO: 644 - DNA, 36 bp, Artificial Sequence; identical to SEQ ID NO: 502
  Description of Artificial Sequence: Synthetic primer

SEQ ID NO: 645 - DNA, 30 bp, Artificial Sequence; identical to SEQ ID NO: 503
  Description of Artificial Sequence: Synthetic primer

SEQ ID NO: 646 - DNA, 30 bp, Artificial Sequence; identical to SEQ ID NO: 504
  Description of Artificial Sequence: Synthetic primer

SEQ ID NO: 647 - DNA, 30 bp, Artificial Sequence; identical to SEQ ID NO: 505
  Description of Artificial Sequence: Synthetic primer

SEQ ID NO: 648 - DNA, 31 bp, Artificial Sequence; identical to SEQ ID NO: 506
  Description of Artificial Sequence: Synthetic primer

SEQ ID NO: 649 - DNA, 31 bp, Artificial Sequence; identical to SEQ ID NO: 507
  Description of Artificial Sequence: Synthetic primer

SEQ ID NO: 650 - DNA, 30 bp, Artificial Sequence; identical to SEQ ID NO: 508
  Description of Artificial Sequence: Synthetic primer

SEQ ID NO: 651 - DNA, 30 bp, Artificial Sequence; identical to SEQ ID NO: 509
  Description of Artificial Sequence: Synthetic primer

SEQ ID NO: 652 - DNA, 32 bp, Artificial Sequence; identical to SEQ ID NO: 510
  Description of Artificial Sequence: Synthetic primer

SEQ ID NO: 653 - DNA, 30 bp, Artificial Sequence; identical to SEQ ID NO: 511
  Description of Artificial Sequence: Synthetic primer

SEQ ID NO: 654 - DNA, 30 bp, Artificial Sequence; identical to SEQ ID NO: 148
  Description of Artificial Sequence: Synthetic primer

SEQ ID NO: 655 - DNA, 30 bp, Artificial Sequence; identical to SEQ ID NO: 513
  Description of Artificial Sequence: Synthetic primer

SEQ ID NO: 656 - DNA, 30 bp, Artificial Sequence; identical to SEQ ID NO: 514
  Description of Artificial Sequence: Synthetic primer

SEQ ID NO: 657 - DNA, 30 bp, Artificial Sequence; identical to SEQ ID NO: 515
  Description of Artificial Sequence: Synthetic primer

SEQ ID NO: 658 - DNA, 30 bp, Artificial Sequence; identical to SEQ ID NO: 516
  Description of Artificial Sequence: Synthetic primer

SEQ ID NO: 659 - DNA, 30 bp, Artificial Sequence; identical to SEQ ID NO: 517
  Description of Artificial Sequence: Synthetic primer

SEQ ID NO: 660 - DNA, 36 bp, Artificial Sequence; identical to SEQ ID NO: 518
  Description of Artificial Sequence: Synthetic primer

SEQ ID NO: 661 - DNA, 30 bp, Artificial Sequence; identical to SEQ ID NO: 519
  Description of Artificial Sequence: Synthetic primer

SEQ ID NO: 662 - DNA, 30 bp, Artificial Sequence; identical to SEQ ID NO: 520
  Description of Artificial Sequence: Synthetic primer

SEQ ID NO: 663 - DNA, 31 bp, Artificial Sequence; identical to SEQ ID NO: 521
  Description of Artificial Sequence: Synthetic primer

SEQ ID NO: 664 - DNA, 31 bp, Artificial Sequence; identical to SEQ ID NO: 522
  Description of Artificial Sequence: Synthetic primer

SEQ ID NO: 665 - DNA, 30 bp, Artificial Sequence; identical to SEQ ID NO: 523
  Description of Artificial Sequence: Synthetic primer

SEQ ID NO: 666 - DNA, 36 bp, Artificial Sequence; identical to SEQ ID NO: 524
  Description of Artificial Sequence: Synthetic primer

SEQ ID NO: 667 - DNA, 30 bp, Artificial Sequence; identical to SEQ ID NO: 525
  Description of Artificial Sequence: Synthetic primer

SEQ ID NO: 668 - DNA, 36 bp, Artificial Sequence; identical to SEQ ID NO: 526
  Description of Artificial Sequence: Synthetic primer

SEQ ID NO: 669 - DNA, 30 bp, Artificial Sequence; identical to SEQ ID NO: 527
  Description of Artificial Sequence: Synthetic primer

SEQ ID NO: 670 - DNA, 36 bp, Artificial Sequence; identical to SEQ ID NO: 528
  Description of Artificial Sequence: Synthetic primer

SEQ ID NO: 671 - DNA, 20 bp, Artificial Sequence
  Description of Artificial Sequence: Synthetic primer
atagcaggcttttacacacc

SEQ ID NO: 672 - DNA, 30 bp, Artificial Sequence; identical to SEQ ID NO: 530
  Description of Artificial Sequence: Synthetic primer

SEQ ID NO: 673 - DNA, 30 bp, Artificial Sequence; identical to SEQ ID NO: 531
  Description of Artificial Sequence: Synthetic primer

SEQ ID NO: 674 - DNA, 31 bp, Artificial Sequence; identical to SEQ ID NO: 532
  Description of Artificial Sequence: Synthetic primer

SEQ ID NO: 675 - DNA, 30 bp, Artificial Sequence; identical to SEQ ID NO: 533
  Description of Artificial Sequence: Synthetic primer

SEQ ID NO: 676 - DNA, 19 bp, Artificial Sequence
  Description of Artificial Sequence: Synthetic primer
gcgcccggaaaaccatgat

SEQ ID NO: 677 - DNA, 18 bp, Artificial Sequence
  Description of Artificial Sequence: Synthetic primer
ccgtttacttctcatctg

SEQ ID NO: 678 - DNA, 17 bp, Artificial Sequence
  Description of Artificial Sequence: Synthetic primer
cctaacaccaagtgtcc

SEQ ID NO: 679 - DNA, 17 bp, Artificial Sequence
  Description of Artificial Sequence: Synthetic primer
ttggctccagcaggatc

SEQ ID NO: 680 - DNA, 22 bp, Artificial Sequence
  Description of Artificial Sequence: Synthetic primer
ttccagaatgttacttaaaaga

SEQ ID NO: 681 - DNA, 17 bp, Artificial Sequence
  Description of Artificial Sequence: Synthetic primer
tagctcactccaagctc

SEQ ID NO: 682 - DNA, 19 bp, Artificial Sequence
  Description of Artificial Sequence: Synthetic primer
gcattgtggcctctggcta

SEQ ID NO: 683 - DNA, 17 bp, Artificial Sequence
  Description of Artificial Sequence: Synthetic primer
ggacatggtctcagaat

SEQ ID NO: 684 - DNA, 21 bp, Artificial Sequence
  Description of Artificial Sequence: Synthetic primer
gaagcctaaaaatgtgtaaaa

SEQ ID NO: 685 - DNA, 19 bp, Artificial Sequence
  Description of Artificial Sequence: Synthetic primer
ccattgtaaagtcctagca

SEQ ID NO: 686 - DNA, 17 bp, Artificial Sequence
  Description of Artificial Sequence: Synthetic primer
tgctgtccatcattgag

SEQ ID NO: 687 - DNA, 17 bp, Artificial Sequence
  Description of Artificial Sequence: Synthetic primer
ggcaggcagatcacgag

SEQ ID NO: 688 - DNA, 20 bp, Artificial Sequence
  Description of Artificial Sequence: Synthetic primer
aaaagcagtttgatgtagag

SEQ ID NO: 689 - DNA, 19 bp, Artificial Sequence
  Description of Artificial Sequence: Synthetic primer
acaggtgataaacagtttc

SEQ ID NO: 690 - DNA, 22 bp, Artificial Sequence
  Description of Artificial Sequence: Synthetic primer
gtcaatataaaaattggtaaac

SEQ ID NO: 691 - DNA, 21 bp, Artificial Sequence
  Description of Artificial Sequence: Synthetic primer
aagagatttctcacaaattga

SEQ ID NO: 692 - DNA, 17 bp, Artificial Sequence
  Description of Artificial Sequence: Synthetic primer
cagaatccatgcattgt

SEQ ID NO: 693 - DNA, 19 bp, Artificial Sequence
  Description of Artificial Sequence: Synthetic primer
gctattagccaggcagcaa

SEQ ID NO: 694 - DNA, 19 bp, Artificial Sequence
  Description of Artificial Sequence: Synthetic primer
gctgcctggctaatagcta

SEQ ID NO: 695 - DNA, 18 bp, Artificial Sequence
  Description of Artificial Sequence: Synthetic primer
ctgagtatatgatgtaag

SEQ ID NO: 696 - DNA, 20 bp, Artificial Sequence
  Description of Artificial Sequence: Synthetic primer
gtatgtaaacagcaactctg

SEQ ID NO: 697 - DNA, 19 bp, Artificial Sequence
  Description of Artificial Sequence: Synthetic primer
gtctaaagatgttcatccc

SEQ ID NO: 698 - DNA, 21 bp, Artificial Sequence
  Description of Artificial Sequence: Synthetic primer
gtgtgcagtaataacaatgat

SEQ ID NO: 699 - DNA, 17 bp, Artificial Sequence
  Description of Artificial Sequence: Synthetic primer
agaaagcctgcaaagga

SEQ ID NO: 700 - DNA, 17 bp, Artificial Sequence
  Description of Artificial Sequence: Synthetic primer
tggagctagggaggaag

SEQ ID NO: 701 - DNA, 21 bp, Artificial Sequence
  Description of Artificial Sequence: Synthetic primer
atgtggatagagaaattcaaa

SEQ ID NO: 702 - DNA, 19 bp, Artificial Sequence
  Description of Artificial Sequence: Synthetic primer
ttttcttccttgtagcatc

SEQ ID NO: 703 - DNA, 17 bp, Artificial Sequence
  Description of Artificial Sequence: Synthetic primer
cactctacagtgtggga

SEQ ID NO: 704 - DNA, 20 bp, Artificial Sequence
  Description of Artificial Sequence: Synthetic primer
catcgtcatagtagagattc

SEQ ID NO: 705 - DNA, 21 bp, Artificial Sequence
  Description of Artificial Sequence: Synthetic primer
aagatgaatggactctcctgt

SEQ ID NO: 706 - DNA, 23 bp, Artificial Sequence
  Description of Artificial Sequence: Synthetic primer
ggacatatttacttctagctgat

SEQ ID NO: 707 - DNA, 21 bp, Artificial Sequence
  Description of Artificial Sequence: Synthetic primer
cctcccaaaaatatgcctttg

SEQ ID NO: 708 - DNA, 19 bp, Artificial Sequence
  Description of Artificial Sequence: Synthetic primer
cgagagtgctcggtgcata

SEQ ID NO: 709 - DNA, 22 bp, Artificial Sequence
  Description of Artificial Sequence: Synthetic primer
gaaatatgtgttttaacgagaa

SEQ ID NO: 710 - DNA, 18 bp, Artificial Sequence
  Description of Artificial Sequence: Synthetic primer
gtgtccagactcttgatt

SEQ ID NO: 711 - DNA, 20 bp, Artificial Sequence
  Description of Artificial Sequence: Synthetic primer
ctgtggtgtttctgatgcct

SEQ ID NO: 712 - DNA, 23 bp, Artificial Sequence
  Description of Artificial Sequence: Synthetic primer
tgcaaaggtgttagaagcacctc

SEQ ID NO: 713 - DNA, 17 bp, Artificial Sequence
  Description of Artificial Sequence: Synthetic primer
aggcatggtgcttagat

SEQ ID NO: 714 - DNA, 19 bp, Artificial Sequence
  Description of Artificial Sequence: Synthetic primer
cgatgagtttgaaaatcca

SEQ ID NO: 715 - DNA, 17 bp, Artificial Sequence
  Description of Artificial Sequence: Synthetic primer
tctcggatcttccatcc

SEQ ID NO: 716 - DNA, 21 bp, Artificial Sequence
  Description of Artificial Sequence: Synthetic primer
ctgagcaaaaatatatggtga

SEQ ID NO: 717 - DNA, 21 bp, Artificial Sequence
  Description of Artificial Sequence: Synthetic primer
gtgactctaatatccaagcta

SEQ ID NO: 718 - DNA, 19 bp, Artificial Sequence
  Description of Artificial Sequence: Synthetic primer
aaacatctgcattttaaac

SEQ ID NO: 719 - DNA, 20 bp, Artificial Sequence
  Description of Artificial Sequence: Synthetic primer
tgtcttcagtattcacctta

SEQ ID NO: 720 - DNA, 17 bp, Artificial Sequence
  Description of Artificial Sequence: Synthetic primer
aggctggagtgcagtgg

SEQ ID NO: 721 - DNA, 18 bp, Artificial Sequence
  Description of Artificial Sequence: Synthetic primer
ttcctagcctttaccttt

SEQ ID NO: 722 - DNA, 21 bp, Artificial Sequence
  Description of Artificial Sequence: Synthetic primer
aggcgtatagtaggtgtttag

SEQ ID NO: 723 - DNA, 23 bp, Artificial Sequence
  Description of Artificial Sequence: Synthetic primer
ctcttatttaaacttgatctctc

SEQ ID NO: 724 - DNA, 22 bp, Artificial Sequence
  Description of Artificial Sequence: Synthetic primer
aaactgagaatgttgatggaca

SEQ ID NO: 725 - DNA, 17 bp, Artificial Sequence
  Description of Artificial Sequence: Synthetic primer
gtccgcactgcctttat

SEQ ID NO: 726 - DNA, 17 bp, Artificial Sequence
  Description of Artificial Sequence: Synthetic primer
atgcaccaatcagcacc

SEQ ID NO: 727 - DNA, 17 bp, Artificial Sequence
  Description of Artificial Sequence: Synthetic primer
gggaagctcaggcatgg

SEQ ID NO: 728 - DNA, 22 bp, Artificial Sequence
  Description of Artificial Sequence: Synthetic primer
tcccatttccattatttttttt

SEQ ID NO: 729 - DNA, 20 bp, Artificial Sequence
  Description of Artificial Sequence: Synthetic primer
gaagaaacagaaaaatgtgc

SEQ ID NO: 730 - DNA, 22 bp, Artificial Sequence
  Description of Artificial Sequence: Synthetic primer
ttgcattgcttccaaaatgatc

SEQ ID NO: 731 - DNA, 19 bp, Artificial Sequence
  Description of Artificial Sequence: Synthetic primer
agaggaaaaattgcctatg

SEQ ID NO: 732 - DNA, 21 bp, Artificial Sequence
  Description of Artificial Sequence: Synthetic primer
ttctcaaggatatagctggag

SEQ ID NO: 733 - DNA, 19 bp, Artificial Sequence
  Description of Artificial Sequence: Synthetic primer
gtgcactggagcagttctg

SEQ ID NO: 734 - DNA, 20 bp, Artificial Sequence
  Description of Artificial Sequence: Synthetic primer
ctgctaagtctgagtcccat

SEQ ID NO: 735 - DNA, 24 bp, Artificial Sequence
  Description of Artificial Sequence: Synthetic primer
aagatgcatttatcagattgtata

SEQ ID NO: 736 - DNA, 19 bp, Artificial Sequence
  Description of Artificial Sequence: Synthetic primer
aagaagaaaggttgaagac

SEQ ID NO: 737 - DNA, 22 bp, Artificial Sequence
  Description of Artificial Sequence: Synthetic primer
gtagaggattgattagaactga

SEQ ID NO: 738 - DNA, 24 bp, Artificial Sequence
  Description of Artificial Sequence: Synthetic primer
ttctaacagtgtatttaatcatca

SEQ ID NO: 739 - DNA, 19 bp, Artificial Sequence
  Description of Artificial Sequence: Synthetic primer
cagaagagtctctggggag

SEQ ID NO: 740 - DNA, 22 bp, Artificial Sequence
  Description of Artificial Sequence: Synthetic primer
attttgtttaccaagaagcctc

SEQ ID NO: 741 - DNA, 17 bp, Artificial Sequence
  Description of Artificial Sequence: Synthetic primer
gaccatcctggctaaca

SEQ ID NO: 742 - DNA, 19 bp, Artificial Sequence
  Description of Artificial Sequence: Synthetic primer
cttatgctcttctacctca

SEQ ID NO: 743 - DNA, 21 bp, Artificial Sequence
  Description of Artificial Sequence: Synthetic primer
gttgatttggttagcaataat

SEQ ID NO: 744 - DNA, 17 bp, Artificial Sequence
  Description of Artificial Sequence: Synthetic primer
aacatcctaggtcctct

SEQ ID NO: 745 - DNA, 22 bp, Artificial Sequence
  Description of Artificial Sequence: Synthetic primer
cctaattaaggggaagaagaag

SEQ ID NO: 746 - DNA, 24 bp, Artificial Sequence
  Description of Artificial Sequence: Synthetic primer
ggttttgcctaatatattttgatg

SEQ ID NO: 747 - DNA, 19 bp, Artificial Sequence
  Description of Artificial Sequence: Synthetic primer
gcgcccggaaaaccatgat

SEQ ID NO: 748 - DNA, 18 bp, Artificial Sequence
  Description of Artificial Sequence: Synthetic primer
ccgtttacttctcatctg

SEQ ID NO: 749 - DNA, 17 bp, Artificial Sequence
  Description of Artificial Sequence: Synthetic primer
cctaacaccaagtgtcc

SEQ ID NO: 750 - DNA, 17 bp, Artificial Sequence
  Description of Artificial Sequence: Synthetic primer
ttggctccagcaggatc

SEQ ID NO: 751 - DNA, 22 bp, Artificial Sequence
  Description of Artificial Sequence: Synthetic primer
ttccagaatgttacttaaaaga

SEQ ID NO: 752 - DNA, 17 bp, Artificial Sequence
  Description of Artificial Sequence: Synthetic primer
tagctcactccaagctc

SEQ ID NO: 753 - DNA, 19 bp, Artificial Sequence
  Description of Artificial Sequence: Synthetic primer
gcattgtggcctctggcta

SEQ ID NO: 754 - DNA, 17 bp, Artificial Sequence
  Description of Artificial Sequence: Synthetic primer
ggacatggtctcagaat

SEQ ID NO: 755 - DNA, 21 bp, Artificial Sequence
  Description of Artificial Sequence: Synthetic primer
gaagcctaaaaatgtgtaaaa

SEQ ID NO: 756 - DNA, 19 bp, Artificial Sequence
  Description of Artificial Sequence: Synthetic primer
ccattgtaaagtcctagca

SEQ ID NO: 757 - DNA, 17 bp, Artificial Sequence
  Description of Artificial Sequence: Synthetic primer
tgctgtccatcattgag

SEQ ID NO: 758 - DNA, 17 bp, Artificial Sequence
  Description of Artificial Sequence: Synthetic primer
ggcaggcagatcacgag

SEQ ID NO: 759 - DNA, 20 bp, Artificial Sequence
  Description of Artificial Sequence: Synthetic primer
aaaagcagtttgatgtagag

SEQ ID NO: 760 - DNA, 19 bp, Artificial Sequence
  Description of Artificial Sequence: Synthetic primer
acaggtgataaacagtttc

SEQ ID NO: 761 - DNA, 22 bp, Artificial Sequence
  Description of Artificial Sequence: Synthetic primer
gtcaatataaaaattggtaaac

SEQ ID NO: 762 - DNA, 21 bp, Artificial Sequence
  Description of Artificial Sequence: Synthetic primer
aagagatttctcacaaattga

SEQ ID NO: 763 - DNA, 17 bp, Artificial Sequence
  Description of Artificial Sequence: Synthetic primer
cagaatccatgcattgt

SEQ ID NO: 764 - DNA, 19 bp, Artificial Sequence
  Description of Artificial Sequence: Synthetic primer
gctattagccaggcagcaa

SEQ ID NO: 765 - DNA, 19 bp, Artificial Sequence
  Description of Artificial Sequence: Synthetic primer
gctgcctggctaatagcta

SEQ ID NO: 766 - DNA, 18 bp, Artificial Sequence
  Description of Artificial Sequence: Synthetic primer
ctgagtatatgatgtaag

SEQ ID NO: 767 - DNA, 20 bp, Artificial Sequence
  Description of Artificial Sequence: Synthetic primer
gtatgtaaacagcaactctg

SEQ ID NO: 768 - DNA, 19 bp, Artificial Sequence
  Description of Artificial Sequence: Synthetic primer
gtctaaagatgttcatccc

SEQ ID NO: 769 - DNA, 19 bp, Artificial Sequence
  Description of Artificial Sequence: Synthetic primer
gatccgtctgaagtgtatt

SEQ ID NO: 770 - DNA, 19 bp, Artificial Sequence
  Description of Artificial Sequence: Synthetic primer
gaagctgaaccgcattgga

SEQ ID NO: 771 - DNA, 19 bp, Artificial Sequence
  Description of Artificial Sequence: Synthetic primer
cctacggcattgtgtatcg

SEQ ID NO: 772 - DNA, 19 bp, Artificial Sequence
  Description of Artificial Sequence: Synthetic primer
acttgctcatgaccgacaa

SEQ ID NO: 773 - DNA, 23 bp, Artificial Sequence
  Description of Artificial Sequence: Synthetic nucleotide sequence motif
  modified_base (3)..(21): a, c, g, or t
aannnnnnnnnnnnnnnnnnntt

SEQ ID NO: 774 - protein, 6 aa, Artificial Sequence
  Description of Artificial Sequence: Synthetic 6xHis tag
HHHHHH
